United States Patent Application Publication US 2026/0271966 A1 - sequence listing, part 2

SEQ ID NO: 3 - DNA, 1000000 bp, Bacillus subtilis
  source 1..1000000: mol_type = genomic DNA; strain = Strain 105 ELA191105 ATCC PTA 126786
aacaagcatcatcaaatagacttatccgtgttctagacctaaaacgtgcatcatgttgccaagaaaatgttgcatttggctcaaaagtaaaatcgctttttttgccaccaagctgccagacaatctttcctgttgttttatcaaccaaataaatcgcccacatgttacgcatgcttattagaagagtattgttcggcccttcctcaactgaattcacgtgaaaacagtcccaaatattgttagcgcttgtggcggatgacgcaggtaacatcgagtcatccggattaacatgagcaagcacatcccagaagaaaagaagctctcctgtctcaagatctacttcttgaatggaataattgtcaaagtacccatctgccggacctccatacattgtgagatccgctggcacttgtttcacagcagtaaacaaagccgtatcttgctttgtaatcgtaaactcgtgaacatcagaggtaaatccttttttggcggtgagtttcttaatcactttataattctgattgatgatttgataaaaagctccaggttccggatcccccgccgggagattaggatcattagactgagttccagatattgttccttgccacatggtaagaacgggttcccctttgtaggattgtaccctaaagtccgtattttgtgtaaatctactatcaagaggtctaaaccatactgggttaccagcttgatctatgatcaatgcacctgtttgcccaatcatagttgcgccgaacacagtatagggtgcaacgaatattaagccgggtgctgtccctggcttgttgacatttatagaaaccttcataggatgcagggtaggagccgaaacaaagttccattcttgtgagcttgaatgatttgcggatgccttatcaccgcatcccccataaatggcacgcataattccgtatcgggacagaatcccgggttttcatcacataatgatttggcaaaggcaggattttgttggctgaggtttttaaaataacagacaatctcatgattgcgaacaggtaaactgttcagttgaaaagagagcgttaccttcttgtctacatgttgatagagtaatccttgctttgtaaatggaggcggatatgcttgatccggcaaggtgggaataatgtcatggatattgaaaatacgaatactattctttaccgtttggttgaaccgggacgcaaagacagggtcagcgactcgagggctgccataagtatacacaaaaggatttttaaatcgggtattcaccgcaatatcaaaagcggctaacacggctaaagctcctcctaaactatggcctgcgactaataatctttttgctgcataaagcttggttaattccccgatcagctcatttcttgtcgattgataaagacatgtaaatccacgatgggtttttcctgcatttctgacaaacggatatggtacttgatataagtcttggtccgactcattgtccttaaatgttcgggttcctctaaaaattacaatgatctgatcttgtgactcggcaataaaaccaaatacttcagcttccggatcctcaacaccagcaagagctcgtatggtatatcgaaggctatatccttttggcaagacaagcggttccttttcaaagagttgatatgactgatagatcatggccgatagcaatatcgaatcctcacggttaaacatataatataagcttgagtgattcatccgagcagctcctttcttttattcctagcatgttcctcgaaacggagtacacatgtcaggatcgggacaaaaccctggatttttatcgcataatatttcggagaaatcaggattcattttactaaggtatttaaaataacaagcaatcgcatcattgcgcggcgtattattcaattgaagagagattggatactttgtttttacatggtgatagtataatccttcctccgtaaaaggtggtggatacttttttgctgggaaagttggaaacgagtcatgaatatttacaattcgtatactatttttcaccactttgttaaattgggaagcaaagacagggtcaccgatacgcggactgccatacgtatacaagaaaggatgattaaacccagtgttcgcagcaatatctaaagcagctaacgttgccaaagctcctccgtagttgtgcccggtaacaaacagcttttttgacttagaaagtttatttatttgtctgattaaattgtttcttgttgattgataaagacatgtgaatccacgagacgttttcccgccatttttaacatagggatagggaacttgaaatatgtcataggatgctaaaagatccttaggatatgctgcgtatcctctaaacgctataacgatttgatcttgtgactcggcaataaaaccgaatacctcttccataggattctctacgtcagcaaaagcacgaatagtatatcgaagtttaaagccttctggtaaggtaagtttcccttctaaaaagaatggatatgtctgatagctcattgctgcaagaaatattgcggctttgctattaaaaatattgtttttatctaaagaaaccatatatacgcaatccctttcttaatataggtaaatatgatgttaatggtacaatatgaatgaaaacccggaattgctaatgatggtgatatgaacggggatatgggtaaagaaacgtggaagttacttaatgacggaataaaagaaaatgtaaaaagacaaaaagcgccctgttgcaggggcgctttttgattaagatgcatattgaggagatgtatcctcctttactgctttttcttcaggtatatgaatgcatttcgtcatgattgcactcgcaacgtaaaggaccgcaaagatccagacgacgccttgcgcaccgacgagaccgatgaacaaccaagcaagcgcgggaccgacaaacgctgataaacctgcagccaaattcaatacagacatggctgcccctttgtcttttccggccaccgtcggcacaattgccccgatcggcacatagcctgccagcaaacctccccaaataaagccgatcacactgacaaccgctacacttccgccggagaaaaccggtgcataatataataagacagtgaaaatgccgcagccgactccgccgaaccaaataacagtatttttccagccgaatttatcgccgacaataccaaagataagattaaacacaatgttccccagaaaaatcgttccccaaatttgcagccacacattggttgaaattccatgctgggccatgtgcatcggcaaaaagactggaaaaccatatgtaccaatgctgttgatgattctgatgattccgcctgtaaacacgcgcggatttgtaaataaaatcgtaaccccttttaaaagctcctcggctgtttctgatctttttcttttcttcttttcaaaacggtctttattgataaacaatgcaaagaatgcaccgagacatacccagaaaatagagctccaaagcgtattcaaataaccgaacgctttgatcgcgtagcttgagtaccaagcgccgaacacaaacatgccgaggcaatatgctatccaaaaccagccgacagcagtgctcagtttgctttgcggtgttctgtaaatgacccatgtcaagaaagaataagcaaaaagcgggtaacctaacccttttacgaagtaagtcacatacatcactggcaggttcagctgttcaaatccaaatacgataaaagcagctgtaccgatcacataaaacaacagccccataaacatcgttcgttttgcgccaaatgcttcgagacatacacccgaaaaccaggaagctatggcaagcgcaattccgtatatactaaaaatagaagcggactgctgaacggtgagcccgttttcgatcaaaaaaggactgagccagccttgttcaaggccatctcccatcataaacaaaacaacccctaaaaatccccaggcaagccgcttcggtattcctattttatccaacatatctgtctcctccttagatgcttatatccattaccgtattaccttattaaagttgaaaattaaatgattcctcaaaacagcaaaaatgctgccgccttaaatcaatactttgctttctgaacctgaaaaaaagcgctgtgtttgcttccatttctcatataaagccaattctgtctgacagtccttcggttcaatcacccggacatttgctgacatctcctccgttaattgaaaggtttcattgcaaatgactgcagcaccaacgacagatgcctgatgatatccctcttggacatagacctttttttgaagaagatccgcgatatattgagtgagcactttgctttggaatccccctccgcacacccaaacatagtcacgttcaaacggagtaacctctgttaaaatgtcaaagttccatttgattgaaaatgcgatttcttctagcgctgcacgtacaaaatgtgccctctttaaatgtgctgacagcggggcatcaaaaagaaaaccgcctctcgttaatgcattcttttcagccgataaataagagccgagagccgctacacatgcatagtcttcttttgcaagtgcagaaatctcctcctccattacttcgtacgtttcattcggataaaaaatctgttttaatttttgataattcaagccggtaattcccggattcgtttccacaagccaatgcccttgatctgtatgacagttcagccaggctttatgttttgtgtcgccatgatccgcagtaattttggttattggcgttgttgtccctgatacaatgacaatgtcctcaagtccagctccggtgcttttgacagccagctgtgtatccccgccccctgctataaccttagcatttattgaaaggcctaattcggatgcatattcatttgctatcgttccaattgctgttcccgctcttacaagaggcggaaggatagatggagaaaagccgaaaatgtcgcacatctcttctgaccaagtgttttgcttcacatcaaatagcagggtttctgttgcctgtgatggttcatatgttaatattccgctcagttggtacgtcacccaatcactgatgcttgtaaagcttgcagtcttttcccataaagagggctggcgctgttttaatccataaagcttgagcgcagaaaaaagtgcagttggcaggcggcctgtgcggctgtatatctcttcccgatcgggaatgcccgcctcccactctcggccgcgattatcgatgttcggcagcccgagaaaaggattgccgttttgatcaatcaaaacaatcccctgtctttggctcgtcgatgtcaaaccaatgatgtcaatatcacgcgaacgggatagcgcacgttttgccaaattcatcacctgcttccacagcacctgaggagaaaaataacggctgtccgggtaaagcgtctctgtggaatactcgatgtcctcccgttcaactgttagaacactgccagttacactcacgaccgctaccctcgcattgcctgtgccaatatcaaaaacgagatagcctttttgttttttcattctcttagcctcctttcttatacccctgttttcagttcgtccttgttatacattgtcggaatattaagagttttttcacccttccactttttgagggctttattcagtatcgtcacgtgatgatcctccacttcaaatgttgctccagcgagatgcggtgttgccagaacattaggcaatgaaatcaattcataatctgattcctctggaggttcatgataaaaaacgtctaatatcgcacctctgattttatgttcttttaatacagataaaagatcttcacggtttacaacaactgctcttgaagtattgacgaaaatcgcactctgtttcatcagatcaaaatgcttccgatcaataagtccaagtgtttcctcagtacgaggcagatgtacagaaacgatatcactgtctgaaaacaccgttttaagagatactttttcatacagcggatgatcgtcttgaatgtatggatcgtaatactttattttacagtcaaacgcagtcagcagttttgcaatcctttggccaaccgccccgaacccaatcatgccaaccgtttttcctgttaattcatttcctttaaatttgacataagcctgcaggtaatcactgttccactttccatccttcagccattgattcgaggcgctggtatggcgcagaaaggaaatcacatttccaataaacatttcagcaacggcttgtgcattccgccctggtgtataaaaaacaggtatgcctctttttgaggcagctgccacatccacattagagggcattcccctgcaaacaccgacaaatgaaagttcgggaacagaagcaaatacgctgtctgttacctgatcaagttcagtaatcaagcctgtcgcatttgttgcttttagcagctgaatgagttcatcttcccgatatgccctaccttgttccttccaagattgataagtaactgagccaaataagttttcaagctcttttcgtccttcttcgttgtacggtgctgtaaccaaaaccgtcatggtgcaaaacatccttttcattgtatttttcataaaaaaaatctctttccgaagatggaaagagattcatatataggcgcgctctgttacaggcagacgccggtataaaccttgctttcctatctttcaagctgacgcttgctggaattggcacaataatgttgccgaggtttcatagggccagtccctccacctctctggatagaaaatgttgagtatgtaattttcagaataaagaatacgtttatcataaagaagtctcagattgatgtcaatctcttttttcagaattgacgttatgatccgaaatgttataattcttacaaaatatctaactagagagaggaactgggccatgaaatcttttgccacacaacaaaacggcattttcaaatccgtttgctcgctggactgcccggatcagtgcggattgttaatacataaaaaagacgaaaaaatcgtaaaagtgcaaggagaccctgatcatcctgtcacagccggaaacatatgcaacaaagtccggaatatgacggagcgcatctatgatgaaaagcggctgactacaccgctcaaacgaacaggtgctaaaggccaagcgatatttgaaccgatttcctggaaagaggcaatcgatacgatcacctcccgctggaaacagctgattgatgaagagggagctgaaagcatacttccttacagcttttacggaaatatggggaaattgacagctgaaggaatggaccgccgctttttttaccgcatggggtcaagccagcttgaacggacgatttgcagcaaagcgggatctgaaggctataaatatacaatgggcataagcgcgggaatcgatcctgaggaaaccattcatacaaaactatttattttttggggaatcaacgcggtcagcacaaatatgcaccaaattacgatcgcccaaaaagcgcgaaaacaaggtgccaaaattgtcgtgatcgatgtgcataaaaatcaaacaggacgtctcgcagattggtttattccgataaagccgggaaccgacagtgcacttgctcttggcatcatgcacattttatttaaagaaaaccttcatgatgaagcatttctgtctgagtacacggttggctatgaagagctccgtgaacacgtgaaacaatatgatcctaaaaaggtatcgacgatcaccggtgtcagtaccgaagatatttaccgactggcaaaaatgtacggggaaacctccccttcttttatcagaatcggaaacggaccccagcatcacgataacggcgggatgattgtcaggacgattgcctgtcttccggcgatcaccggccaatggctgcacacagggggcggcgcaattaagcataacagcggaattttagaatataatacaaatgccttgcagcggcccgacttattgaaagggcgcaccccgaggtcgtttaatatgaatcagcttggcaaggtgcttttggaaacagacccgccgattcgctctctatttatttacggaacgaaccctgccgtcgtcgcacccgaagcaaacaaagtcagacagggcttgctgcgggaagacttgtttactgtggttcatgatttgtttttaacggaaacggctgcatatgcggacattgtactgcctgcaacatccgcttttgaaaatactgatttttacacctcctactggcaccattacattcagcttcagcagccggtgattgagagatatggggaaagcaagtctaacactgaggtgttccgattactggctgaagccatgggattcacagaccaggagcttaaagattcagatgaagtattaatccgccaggcgcttgaccatccagataatccgcatttggcagagattgattacgatgcactcactaagcattcatttatgaaagcaaaacgcgaaaagccgctgtttccgggcgaacttccaacgccaagcggaaaaatagaattatattcagaaaaaatgaaacaagacggcttcccggctttaccgacatatacacctcttgtaaccgataatgaacatccgtttatgtatgttccggggccaaaccataatttcttaaactcaacattttccaataatgaaaaacacatcaagcttgaaaagacgccaaagctctttatcaacacaaaagatgctgaagaacacggaatcgttgatggggcacctgtacgaatttggaacagccggggagaatgcgagctgaccgctgcagttggagaacaagtgctgccaggtgtcgttgtcagccaaggattatgggcggatgaacaaggaaaaaaacagcttgtaaacgcgctaaccccagacagattgtccgatatgggcggcggcgccacctttttttcaggacgcgtgcagattgaaaaagcataaacgaaaaaaccgcccagaacatgttctggcggtttttttttggttgataatgaaacccggagtatgccaagcccgtataacataacatcgacataatggaggcatgcatatggacgtttttttaggaatcggtattgctttggctggctattttatcggtgaaggcttaaagcagaggaaccaaaccaaaggtaatgaacaaaatgatatcttcctaataaaagaacgggatatttacttttacattggactttttttaggaataacaacgactgaagcaaaacagttagctggagacatggcagacctgccttacatcgaaataaacggaaaaaaatatgtccagaaacatatgttaaaagattggacattcacattagttgaaaaacatcagggtgaataaaacaaatctgaggagagcgagattcattgtcacgacgctctcctctgtttagctgtatggattgaccgccaccaaaactttgttctataagcgctgataaaacgataaaccaccatctatgttctttcctcaaacaactcaagatgcccgttccacaacaatagtttttatattcctttgatgacgtgatgttcttgatgaacgtatgtatcgtaaaacacttagaaaacctattcggtttgaatgtgtgctctcattatgcccccatactgcgcctttatccgcggaggatttttttaaaaaaatatgaaacctaaagcttttagatcctgaatttttattgaacctccatatttctccgattggtaaaaattagcctatacaccggaagctgtacgtttataaaggatcagagaatcccataaccagtaaatcactgcagccgcaatacttaacatataataaaagtacgattgcaatgtccatgctattgacgcaggttcattgataacaaaaaacaggaaagctgcgataaaagcaaccacactgtaaatcaataggtacatgacattgaatgttctcgcttttttctgcaacttcatttggagcggaacagcaaaaaggccatacaccacaaaaccgtataataaagcaattgctgccgtaaacaatgcaattatcatatcgccatacataacgaaagaataaaaccctaataacaaaccaaatgtaaggctggatagccctaatgtcattaaataatatgatgcgatttttttcattttttcaccccccttgtttgatttattcacagtgctgttagtataaattcacaacctttgtattaacaatgcgatgataaaaggtttcaaaaatacgactttttattaaataatacgactggcatgaaaatgcctctcctgattagccaaagcgcgaatgaaaaaaagtgaatgaatacctgatcaacagacaaaataagaagagttgatattcaacacttttcgtaaaggagtgaaaccaatgagtaagaaaggtattcaaaattcaagtattgaacaaataagaaatgaccatgagactgaaacagcttttaaagcagatgatcctaaaaaacacggttccgatcctaaaagaacgaaataagttcttacccccactaaaatatcaataatctggaggaagtaaagtgactcaaaaaaacggtgcagacagacctgatgattataaaagattttcttcattagacaaggaatatgattttcagcaatctatacgcagcaatactgagacagaaagtgtaaacactgaaacacaaactcataacaaagaaaacaaaaatgacacaacagatgttgccgggaaatactttgagccctcagattataaaggaagcacgcaattagaaaaaggattggctgaaactcatgaacaggtgagcgatgactattttgaagggacaatcgatcaaaatttggactagccatacaaacggagctacttaaaagaagtcagttagctccgtttgtagaaacaaccacagtaaaagtagccaacccccaccgaataagatgggggttgcacgtaagtagcctgtttaatagttaaaacgattaatgacggtttgaagttcttccgccaattgggatagagattctgcagcataggagatttcctccattgaatgaagctgctcctgtgaagattttgcaaccgcttctgtatttgctgacgtttcttttgtaccagcagccaatgtatgaactgtgtgctgaatcacttcaacgcctgatgtaagctgttgagttgccgctgcgacttcttgtatttgagaagtgacctgttccacgaggttcagtatttcattgaaatttcctgttgcctcttgagaaagaacaatacctgagctcacattttcttgaacaaccttaatattatttaccgtttctagcgattcattttggatggtcgctaccaccgattggatgtggtttgcagatttatttgtttcatccgccaacttccgaacttcttctgccaccacagcaaatccttttccttgctctccggctctggccgcctcgatcgctgcatttagtgccaacaaatttgtctgctctgaaatcgtcgtgataagcgaagagatatcgctgatttctgctgtgctcgctaccaatgtctgcaatccattgccggctgaatctacagatttatctatgaatttcatctgatctaacatcttgttgacggacttagagcctatttcagccttgtctctcatcgaagaagaaagatccgctatgttccctgtatttgaagcaactgatgatatactgtctaataattcagtgatggattctgcgctcttttctgtcattgagctttgcttcacattgctgtcggcagccatctgcatggctcgggaaatatgttcagatgttgatttcgattcttccgcgcttgccgataattcttcggaggaagcggcgacttgttcagatgagctgctgatctgcttcacaatttgagttaatgaatgagtaaaagaattaaacgattgggcaagctgaccaaattcatctttatttttcacaatgacttttttggttaaatcagcgtcgccatgagcaatttcctctagctgcttatttatgcttcttagtggcaccataatggactttaacagcattatgcttagaacaatgcctaatattactgatatccctgtgacaatgataatgagcgattgactcattttcccattgccctgtatttcatcctttagatcctctacctcttgatccaggcgatcagacagcttattgacagccggatctacgacttcttttcttaatgttctttcttctccaaaatggatggtttctgcttttttaggatttgaagagtaggctgttactacctgctgattcaaagctctatactgagtaaaacttgtcttaatgtcttcaatattggattgatacttctcttcatcaatcaagtcattaacccggtcaaggctctttaagacatcgtctgctttttccttcataccctcgtcgtattctttgtctccggtaatcaagaagcctctttcatcatttgataacccggtcaattcatattggatgtgttttatctctttttggaattccattttgtctttaagttcttcattctttttcacagtagaagaaatcataaatactgaggagcctccaattccaataattgaaacaactaatattgatataatccccagcaattttgttttcactttcatgtgtcgttttccctttccgcacaatgtaatggctgaaataaaatatgttcaagcgcgtttgaatccaattcgcttacgctcatgtccataatatcgacacgtgttatcaagttttatagtgctattttcatatgaataagctaattctttacggctctaaatcttcagaaaggcttcacgaaaaattgactgtcttttgtcgtataagtcactcttattctcattttctattaggcatacaaaaaaggcttttcccacctcaaattggctgaaccggctgttttctcgaaaatataatacaatacgcagcataatatgaaggagcgaaacttaaatggggatcatcaatggtaaagaattcattgaccgattgaataaactagaaaacgaaatatggtatgatggcgaaaaaataaagggtaacatttctgagcatcctgcatttaaaggaataatcaaaacaaaaagctcactttatgaattgcaaacaaaggatgagttaatacatgaaatgacttattgccttcctggagatcataatcgaatcggcctttcctatctccagcctaaaaccaaaaatgatttgaaaaaaagaaggaccatgattgaacattgggctagacatactcatggaatgatggggagaagtccggattacatgaatacggttatgatgagctttgcttcgtcagcggagcttctaaaagataaagagaattgctttcctgaacatatactagatatgtatgaacaagctgctaagcatgacctttcctttacccatacattcattactccgcaagtgaaccggtcacagtcctattttgggctaagtgaaaaaccgatatctgctaaagtcattgatagaaccgaaaaaggtttaatgattcatggcgcacgactgcttgcaacacaaggcgggttgaccgatgaaatcttggttttttcagcgcctaaatttttctttgaaacagatgaagcttatgctttttcaatcccttctaatacaaaaggcgtaaaattcatcacaagagaatcatttgtattaagcgactcttcctttaatcatcccttaagctcaaggtatgaagaaatggattcaattgtggtttttgatcatgtgttagtgccgtggaatcgtgtgtttttttacgataatgtggaagcagctaaagattttatgacaaaaagctcttttcatgcctttacctttcaccaggttgtcattaggcaaatgataaaaattgaatttctattaggtgttgcacagcttcttgtcgacaccattaatgtttccgaatatcagcacatccaagaaaagctctcagaaatcattgtgggattggaaacaatcaaagccctcattgacaaatcggaaaatgatgctcagttagatgaattcggctatatgcgcccctgtttaattcctcttcaagtcatcagtacgatcattcctaagctatatcctcgatttactgaaatcatacaattaattggagctagcggaatggtgacactgcctaccgaaaatgcatttgactcagagatacgggaagatcttgaccaatatcttcaagcaaccaatacaaatgctgaagaacgtgtgaaaattttccgtttggcatgggatttaacaatgagttcattcggaactagacaaactcactacgaaagatattttttcggagatcctattcggatttcaagcaggctgtataccagttatccaaagcaggagcagttgaacatgattaaaacatttttacatgcagatacagaacattgaaaaaacagcgggaaaagatccgctgtttcgtattttttattcaggaaactgaacatggcccggtactgtataggctttggacgttccgctttcaggcagctttggaatggtgtctttcacaacttttccgcggatgtcagtcattctgactttgagagagccagtacctaaattcgtactcacaaaatggttatagtccattttctccatgttgatccacttaccatccttttcatattccattttcataacaggatacttgtgatttctgacttggattgctgcccaccacctgctgctgccttctttgatccggtacgtgaaattgccggtgattggggctttgacaacacgccatttaatattgatttttccgtctttcatattgccgattttacggaaggcattaggtgacagatcaagagctccccgagcgccttcgggataaagatcagtaacatatacggttgttttcccttttggcccttcaacttccaaataagagccggcaagtgccgcttttactcctccgtaattgagatccgccggatttattgcagtaatctccatatcggaaggaatgggatccagcaggaaagctcctcctgaataacctgaccctgtatacgttgcataaccttcatgcaggtcgtcatatgctgccgaagcttgcggggaaaaacagaagatcgtcaacaaaaccataccaacaaatgcactcatgatctttttcatatttggtcctcctcaaaccagactccaaatgagaatcattatcattataagactcaatccatctggtttgaaagaggaaatagattcatagttgattttaaggcaaattcactatcattcatatatcaaatgtaggtacttatgaaaaagccaatacaaatgaacgaatgtgcacttcagccgaatgtcttatttttccctctcaaaattcgcatttcaataacgaaatgaaacaggctgttggcctgataacagctatacaggaaaagctatttttccccgctcagtttcaacttagctgtcatcatgatgccaaagatcagcacaatcggaacccaaataatgaagtgataaaaatcaggctcagccagagcaacaataatagcccctacacaatacaaaataatagccagtgctcttaacacagtatctcttaagaaagtcttcttttgcttcttaaaaaacaaacggccggatatatcctctaaaagagaagccaaagtgccggtcaacacagttgaagaaatacctgcaatccccagtttttttgctgctgtagtttgaatccccatagaaatgctcatgagtataattagaatgtgcacaggaacaaatgcccggtaaaaagaaagacaagcaaagacaaacaaaatgaatgcttcaagtgcgagggcttttgtcacagcagaaggccaaagggtattttccgcctttccgaccatcaatgtagcaatgatcacgccgcatataaatccgattagcgcagtcaaggaattaaaaacagtgacttgaatggatttgccgatagctaaccccaataatacaatgtttccagtcatattagctgtgaacacatgtcccaggcttaaatacccgattacatccacgattccagctgttaaacataaaagtgatagcaaggtgtttcgataagctgctgcagtcaacggtgtatcaatcctttcttctatttcaattgttagtatgtcttttggcgcaatctctattttttaagtaacccaacattaattaggaagatagaacctatcattcctttccattaactgtaataataatccccgcaaggaaatgattaaaattgaaaggaagcatattgtgatgaaacgactttgtttatggttcaccgtctttagcttgtttttggttctcttgcctggaaaagcattaggtgcagtcgattttccgaatacctcaacaaatggccttttaggttttgccggaaatgccaaaaatgaaaaaggcatctctaaaacgggcacaacgggtggaaaaaacgggcagattgtttacattcaaagcgtaaatgatttaaaaacccatctaggaggatccactccgaaaattttagtgcttcaaaatgatctttccgcatctgcgaaaacaacagttaccattggctcaaataaaacactcgtgggctcttacgcgaaaaaaacgctgaaaaatatttatttaacaacttcatcagcttctggaaatgtcatttttcaaaatttaacgtttgaacacagtccgcagattaacggaaataatgatatccagctttatttagattccggtatgaactattggattgatcacgtcacattctcaggtcatagctataatgcaagcggaagcgatttggacaaactcgtgtatatcggaaaatccgcagattatatcacgatcagcaactcaaaatttgcgaatcataaatacggtttgattttaggatacccggatgattctcagcatcaatatgacggctacccccacatgacaatcgccaataattattttgagaacttgtatgttagaggcccaggtctgatgagatacggttactttcatgttaaaaacaattacagcaataattttaaccaggcgattacaattgctacaaaagcaaaaatatattccgaatataattactttgggaaaggcagtgaaaaaggcggcatccttgacgacaagggcactggttatttcaaagacataggcagctatccatcactcaacaagcaaacctctccgctgacttcttggaatcccgggtcaaactatagctatcgtgtccaaacgccggaatatacaaaagaatttgtcacgaaatatgccggatcacaaagtacaactctggtatttggctactgatataaaagaggccctgcgttaaaaacgctgtgcctctttttatacttataggctatttttaagcgatccttgtaactccatcaagatccagcgtcggtcaaaccaaaaagcatatgtttttttccgcaataacttcttaaatggctttcttattataccagtttatcgcaagtaaaaagaaatcattgttctggtcctgtattaaatcaacgttcgtcccacacactattcaaaaacccctaaaaaggatgatggatatgtgcggcaggtttactttgtactctgcatttgatgatattattgaccagtttgacatcgatcaattttttcctaaaggtgaataccagccaagctataatgtcgcaccatcacaaaacatccttgcaatcatcaatgatggatcaaataatcgcttaggcaagcttagatggggacttattccaccttgggcaaaagatgaaaagatcggttataaaatgattaatgctcgagccgaaaccattaccgagaaaccggcctttcgaagaccgcttgtcagcaaacgctgcatcataccagcagacagtttttatgaatggaaacggcttgattccaaaaccaaaatcccaatgcggatcaaattgaaatcatctgctctttttgcgtttgctggcttatatgaaaagtggagcacacatcaaggataccctctttatacctgcaccatcataacaactgagcctaatgagttcatgaaagatatacacgaccgaatgccggttatattggcccatgatcatgaaaaggagtggcttaacccccaaaatacaagccctgattatctgcaaagtttgctgctgccttatgatgctgatgacatggaagcataccaggtttcatcattagtaaattcacctaaaaataattcagctgagcttcttgatgcagaaaatcatatgtagtgattgaaattctctagcaagaacttgtcaatagctttgttccttaggtgccaatccctctagtaattatgaatatttagtacatagatcaattagttttcgatatcagttcgaaataattttattatgtaaacttaaataagcaatgttatccctttcatataaaatagtttacatttttataaagtcgcttcacctttctattttgtcagcaaaaaaactgaaccacattaaacttatgaaacctgccgcacctgtgattgcaaatatgatataagcccatagaggtaaatccatacactttccatcctaagaattaaatgaaatttctttcatcttacatgaaggtcttctttcttttgtttatccagtgtaatacttaataatatgttgatgaatgcagctggaaaatatataaatcccactccaagaatgcctagtatcgtacttaaacttactatgtaattctttgtcatcgtttgactgtcaatcaatattagaagtgaaatcaatccagctaaaacacctataaaccaagcatcgccaacagcataagaatcatccagcatccctaaacatcgccccaatatagagctcccaatggcagtcaaactggataaaaatatgagtgctttcatttcttctcctcctttaaagccaatcaaactggtagaaatcggccattgaattcccattatcgaatggttatcatttccacattaacattttaaagctcattacaatacgattcaagcagaaaaaccctacataacgtatatatagggatttaataaaacacaggccaaaattcagctctatctactttaaaaagatatgaagggcagctgtgtgatctgttacgtctttacgtaccgagatatttcacaacaggcactttcttcttgcgcagagaatcaagcatgactgatccagcattcaagttgctttgtactaattctttaggcgtcaatgccatccactgattgagtgacacatctgcatagcggttacttttgaacatttctaaaaaccataatgtttctgtaccagtgttttgtatatagtgtccggcattagaaggcacgtatccaacgtcgcctgctctataatcaaatgtgcgggcagtcccatttccgataaataccgtcattcgtccctgtcctgttagataatattgccactcatcgctattgggatgccaatgaagctctctcatcgcgccaggctcaatctgaacaagtgcagcggctatcgtttttgaaattgggaagttagaagaatccacaattcgtacactcccccctggcatttgaattgggggttgatttaacagctcgtgtttaaaggtcatggggacttttccatatggtgactgaatgtcttcactggcgactgatcccggcacattcccttggtagatatagacttgctcagacggaagagagttgaaagcattctccgggacaccgaaatttgcagacagaacatcttttggtgtgtgtgcaagccaatctgaaatggttaacgttgaaaactcagaaaagttcccatcatcgaaaacgagcagaaactcgcagtgttccaatccctgtatggaatgcggaattcctgccgggaagtaccaaaggtcgccgggaccaacatcagcaatgaaatttcgtccgtcttggtcaacagcggtgatacgtgcccgtcccaaaagcatataagcccactccgcttgcttatgccaatgaagctcgcggacgcctcccgcagttaagctcatgtttacacctgcaatcgcagtcgaaatcggaagctgtcttacggtgatttctcttgaccagccgccgtgatctaatttcatgggagcgtctgagaatgaaaatctcaagttaggaatcataccctcatctgtaacaggcggaacaaatatattcggattttgaatatcccgtattatatttcgcgggcctgtatcaatagctccagctccatcacttcgaataggctgcggcacgtttctgtcttcatgattgattggttgttgttccaacagcatgcacctcgttttagaaatgaacaagattttatttcagcctatgcagaatcttagattgctgtgcctaggaatccgcaaataaaaaagtgaccaccaatgtgatcacaaatacatcaaataaactattttttataccatggcttcttatgtaatttgattgcttctgtctgttttttctggcctgtcctccactccacttttactaatacatcatgtcctatcacttcatcttcaggcatataatcaaaggtggaaatatggtcctccatgcgtcccccacccggcatttcatcacctgtgtactctgataagtcgtactcatctacgttatcatcttgatacttttcgccatctacatacagagtaattctttcaacaacagtccacttttcttccttcttactcccctgccaatatagatttagaaaataattgggtccaattgaagttttgtctgatttttcaaggttagacatccacagtccgcttttcccgctgccctcatatttcactttgtttcctgacaccattacaaataatgtgatgatgcagatgatcaagaatccagcaatgatcaatagccatttcttaatattgttcttttttctcatgtttttcctcactttcctaactttttagtaggaaaatacgatcaaaatgttaccgaaaagaaaataaaaaagggctaatgatctaacagatgactgtctaaacttttgacttaaattaaagtgctctctaaagacaagattaaaacgtataacagctcttaaatgcattttttgtttcattgagtcaagaaccttaaaatggctttttattattaaaaatcaagctagtgtattaagtaacttttcaaatttatttatactcatgatctcgtgagtcacaaatcttccatcaaaaaaaacgctaaaagttgtccaaatagctggtgacttttgtgcctcttctttcgatgataactgaattgactgaaattgaacccctttcttttcagtcaattcccgcaaatcatttatcatgcccactgcaaacggacactgagctgtatagtatatcgtaatccccttttcattgatagaatcacttttcacctggctcttaaatgcaggagaagctgcaaggccattccaagtcaaagccattaattgaaaataaggggcagcttcatcttgtagagtaaaccccatatgctcaaagaaatgcttatcacttaaatagggcagttttttcttgcctgcgatatggataatgccatccatgccgcacgctttcgcatctgctatacatttgtccaacaatcgtttcgcatgaccgttatttttatatctgccagacacccacagacaattaatgtacataaaattaggcgcattgataggcacccatgcctcattcgcaggtaggtattcaataaagacttttgcccgttcatgtaagcgatagaacaccaatccttcatccattcgagctttgagccatctcttcttttcattaactgcatgctcatattgtttcgtgcctaatgcacagcaaatatgattgtcttcaatattgtcctttgtgatttcaatgtagcacatctcctcttttccccctttaacataattacatggaattcaacttcacactttacatgcctaatagaataaatacccgttccaacttaaatactttttcttttccattttgtcaattaactgtaaaactcttcttttattcagatattatcttgattcctatatcacccatttcaaatccaaagtgtgttcatctttgaggattagatgcactgcttatgctataaatacagtacacgaagttttttatttgaagtaatatttgttacgggacagcaatagtaaataagtgataaaaggggaattaaacttggtggaaaaatgttattcttgtttaatttgcagatacaaaggattatttcaaaatcctttgtataaaggcgattatcaaaaaacgtttgacatttgtccatgttgcggttttgaatttggctacagtgaggatcatgatgtgaggttaggttttattgtaactcctgatcatttaattgaggctgcatttcaattgtatcgcaaacaatggattgagagcgggatggtaattgctcatccggaagatattccagaagaattgaaaaatggcaattgcttaaaatttgaagttttgttgaaacaattgaaaaaactaaatcttgacatagaaaattttgaaattagcggtttttaatgatgaaacaggttgcacttgtttaggtttcactgtcattatcagtaaaatgttaagttgaaatgcgcagtcagtcacaaagtctctattcgtattcaataaagactttgtgatcatcgacaaacatttcactcccatcggataaagtatccaaaaggcctcctctggttcttctctatagtcattaatcacagtcactttgacatttgactcagctatgattggttttccaacaatttttcgttttttcctcaggcaaagtaagagatcgaatcatcaaagccattccatctttactgtctaattaatgccatcttcagtgaatttaaaggtctgttttaaattgcgtccttcttgccccttctgtgtccaaattataacaacctctaattcagaggccttatctgccagcataaaatgattgaacttcagcggtgagccatcatttaaactttcagctaacattttagaatcttcttttggtttgacacaattttcatcgggacatccaaaaagcgaaaaccttgtgattgaattagggtcatttctatacaattgcacatccactgtagctgctttttcccctatatttttgacttccaaggaatatacttgatattctcctttttgaggtctcgtaaattcctttacattttttgcttcacttacttttactgaccactgttctgttttttgtgtaataggcaacaccgtaaaagtcagggcatgcgcttttgattggcaaaacgtaaatccaactgctgtaaaaacaattacagaaaataatacccttttcacttcatttatccctccttcctttcactggccgctccttaaagaattgattttgagcaatctacaagctctcttaaccaaaaccttacctgaggttttgtctttactgctctgcatttatttctttcggtatccgagaaggagctttggggatttttctcaatctgctgttaatcacatcagaagagtatagcgtaataatcatacttctcccatacctttttgcccgaattaagattggttggttatattggttttgaaagcgaaagtcaggacctccccagcttaccgtcgcatcccgtccgggcggtacatatggtacacttctagtatgagaatagcgctgaacgatctgcagtcctgcacgatctactgcattaaatagagttgaggacacctgacaaattcctcctcctacaccttcagacaactctccttttacaataatgggtgcacttttatatcctttgttccgagttctcattcccacaacttggttaaacgaaaacgtctcattagggaaaacaacgtgattgtcgattgcttttgcagaaagagaaatattgtgtgaacggcttttattgcttgagttaaaatacgtcacgtactgaccaagctgctgcgtactgatgtgagctagcagctcgctgtcaactttcggataaatgttcatttccggcacttctatcttggagggaccttgcccataaaaatacgcataaaacttttccataaacgcctgttgatacagtttgtagccaaccctgcccgggacgatgcttccatgatcgttaaggacagcatttatcggctcacggtacactttctgatcaagctgtttgatgaatttactgtatttttcatagtcaaccattggagtgccgggaagaggcattgtaaagtcttcacggttaacagtggcaatcgtccgtccttgctgtgtgaccgttaaactgtcctgcggctcactcggctgagccaataaaaaaagaccagtgatcaaaatttgtatcataagtcggtttacctcccaatcattagtatgaacagccgcttatcctttgatgtatttcttcccatcgtttgtttgaatctttagacgttgataaaaaccttcataaaagagcttagctttatgttcacaccgatccctgagctcactgaggcacacggttcattcagtcggcaagtttgaagtagttcagcatctcccagtgatgagggatgcttttttgtcttgtcaaaaatgaaaagggtctcctataacaacaaaaaatcaatccatttcaatatttttttattgagaaacgataaattttttgttacattcaattagacaacaaataaatgaggtgcttgttatgaatcgaatgtcgacaatttttttaaagatagctttggttcttattggaattccaattcttgctttatgcatttttttagtgcctaaggtagccaactattcagcagaattatttccaaatatcgcttatataaaatatctcgttttcatctatttgtatgtaacggcgatacctttttactttgctctttatcaagcgttcaaacttttaagctatattgacaaaaacaaagctttctcgggtttgtctgtaagagctttgaagaatataaaatattgcgcagtcactatcagtatcttttacgcagcaggcatgcctgtcttttatctgatggccgagatagacgacgccccgggtatcattgtgatcggattggttattatttttgcttcaatggtgattgcggtctttgctgctgttcttcaaaaactgttaaaagaagcgattgatataaaatcagaaaatgacttaacggtctgaggtgatgacatggcgattattatcaacattgatgtgatgcttgctaagaggaaaatgagcgtaacagagctttcagagagagttggcatcaccatggctaatctttcgatattaaaaaacggaaaagcaaaggctattcgattatcaactttagaagcgatttgcaaggctttagaatgtcagcccggggatatattggaataccgaagtgatgaagacacaggattcgtaaagaaaaaatatgaaggatcaacagaaaaataaagtgattggcggtgagcttatggacataaacttatatccatctagctgctatactaagcgtccctttcatacacgaagaacacaactatggaggaggcatacatcatgagagccataaaacaaatcgttcattttggctgggaacaagccctttcatgtttgtttcctgccgttatttttgcctctttggctattacgcaaatcatcccactgcccttcttgccgcggtatgactggctgctcattatctgcgttctcatgcaattgtggatggtgcgttccggtcttgagacacgggatgaattaaaagtgatcacattattccaccttattgggcttgctctggaactttttaaagtccatatgggctcctggtcttatccagaagaaggatactccaaaatatttggagtacctttgtatagcggctttatgtacgcaagtgtagccagttatttgtgccaggcatggagaaggcttaatgttgaactggttaagtggccgcctttttttgcagttgttccgcttgccacagcgatttatttgaattttttcacccaccatttttctatagactttcgatggtggttatctgggcttgtcatcattgtcttttggcaaacatgggttacatacgaggtgaatggagctcgttaccgtatgccgctcgcactttcttttgtactcatcggattttttatatggatagcggaaaatatcgctacgttttttggagcttggaaatatccaaaccaaatcgatacatggagtctcgtacaccttggaaaggtaagttcatggctcttgctagtgattgttagctttcttatagtagcatcattaaaacaagttaaggagcagagtcccacaaaggcagagatggatgaatctttttcttagcatacaaggtcccaaatagagtgaaaagcaacgttcaaatggttgcttttttcttttatgtaactctgccggtgagtattcatcttcttcaaatttcatcgcaccacgataactgattcagattacaactgctttcaacacattgataaactcatgcgccgccggcgttatctcttcaaatgaatgtacgatgacgccaatatcgcgtgtgaccctaggaaagatgtcctttttaatcaattgatgcgggacggatgaaagtgtaaagtttgaaatgatgccgatacccaagttatttttgaccatattaatcaaggtttcggcattttgcacagttaagttttcctttaattcgatgttgtattgcgaaaatgcgtttgacatcgcgatttcatgaccgcctttacaaaaaatgaggtcatcttgatatgtttcaaggtcgacatgcttttcaagttttaattcgtcacgctgcggcgggatgacggccaccatatagtcgttacacaatagctgattttcaaacggttcaaatggagatgctgcgattccgatatcaaccgtccgatcctcaacccatccttttatttggtcagaggttccttcgatcaattctatgcggatcagcgggtagtttgatctgaatgcagcaatcgcctgtggcatgatatttgttgaaactgcaggaaatgaaccgattttcaccttcccgtttaacagcttgttttcccggttggctacttgatatattttgctttcaattcccttcatttgcctcgcaagcagcaatatttcttttccgatgtcagtcagcattaaaccatgatgtttatccctgatcaataatttgagctgcagtgagctctccaggttttttatcgctttgcttaccgccggctgagagatgaacaattcttttgccgcttctgtaatattcaatttctccccgacttttacaaatatgtgaagatggttcatattcataaccatttggttatacccccaataataaaaatgtatttcagttatacataaatgtaacatatgatagaaaccagcacgatatttaaacaagaaaggcggcttcattatggtaaaagttatgctgggaatcatatctgtcacacttatttggggttatacttgggttgcgatgaaagtaggaattcatgacatccccccgcttttattttcgggtttgcgcctgttcatcggagcagttcctttatttctcattctcttcatccaaagaaaaaagctttcaataaaaaaagaacatctcaaaagctatatcatcatgagcctgttgatggggctgggctatatggggattttgacgtatggaatgcagtttgtcgattcagggaaaacctctgttttggtatatacaatgcctatatttgttacggtgatcagccatttttcattaaacgagaaaatgaatgtgtatagaacgatgggactggtctgtggcctcttcggactgttatttatatttggaaaggaaatgctcaatatcgaacaaagcgctttatttggggagctgtgcgtacttgcggcagcgcttagctggggaatcgcgaatgtgttcagcaagctacaattcaagcatatcgatattattcacatgaatgcctggcaccttatgatgggagccgtcatgttattggtgttttcctttatatttgagccggtcccttcagccgagtggacatatcaggcggtgtggtcattgctgtttaatggcttgctttccaccggctttacctttgtcgtatggttttgggtgctcaatcaaatccaagcgtcaaaagcatccatggcattaatgtttgttcccgtattagccctattctttggatggctgcaattgcacgaacagatcaccatcaatattatcctcggcgcactgctgatatgctgcgggatttttatgaatacatttacattttcacgacggaaagtgtgaatgatatacatttcccctgtcatttgggcttcatgtgacaggagacgactattacgagaaagtcttctagaatcctgacgacagcctattaaacaatgaaaaaagctaatgtctgcatgtagacattagcttggctggcgtttaggctggtgagaatccagatacttttttattaccattctggctgatcaaactgaaaaccgtatagaccttttactttaacatctccgcaatctggatcttttgtcaaaatcaaataatgagtcttataaggcatcgtctcaactcgatcagttgcactcaaatcaaaatgatcccctgagaagtttttttcactaacggttatttcatatcctgacaaagtcattcgcatgattcttgcgttaattgtacatccttcagtatcgaaaatggtgaatctgtacccaaagtgagatgtccaatggtttgaatttaggtcatcagacttcataaaccatttttcattttctgtcattgtaaaactcactttctcctcatctttcacgataacagccgaagcttcccctacatggatagtcaaagccaaaagaaatgtaaaagctaacatcaacatctttttcaaaagagttcctcccgatatctttttacttcaatttattggaagggtcttttctgatcaagacagtcttctccaaatgaatctttagcatcatgaaatgagccttaataagaacagttttaacccaaatcaaactctattcgaaataaggcttaccaatctatattctttttaaaagtttctgcatttctttatatagctcctagacacatataaaaaatgctcccataagttcaggagcactacaaaaaactgctaaagtgttttctatcgatttattgtattcattagctcaaagaagtattcaggcttataagtcttattcagcttataccatgaacgcaatgtatctggtgcaaatacttctaattttttcaatacttctaccgcaaattccagaggagcaattcctgatgcagtaaccaaattttcatcagatactgcaggttccttttcatatagtgtttctcctttgtaattagggcagaccattttcatatactctaggtcattgcttgtgtgctttctcgaatttaagtatccttcattcgcgaggcccaaggttgcaccacaaatcgcagcaatagtcgtgccaagctttaaagcgtcgccaacttttttcaagatcggctgatgaatatcttctccccaagtgtttcctccgggtaaaatgataagatcttgactctcaagagtacactcatcaagagaaatatctggttttatgcttaatccgcccaacgtagttatcatttctttattagcccctactgtaactacttttaaagatgctgcatcctgtttaaaatatctccctgagtttagttcagcaattaaatatccatattcccagtctgacattgtgtgaaatacgtagagataaacttttctcgtttgcatccaataacactccaatcacaattgataaagctttctaatagatgactttgctgacagccattgtcagcatatgtattctgatttgcctattcttatataataccatgtaggtgggcaattgcccttgttctcccaacttattaaaaatataagataaattgattctatgtttactagcgcaaaggggtttgttacactaactgtcatgggaaacatttcaaaggtaatataaaatcatttgaatgaggaggcctgatgaagttgaaaaataaagcgtcaataaaattcggaatatgtgttgggcttttatgtttaagcattactggtttcacacctttttacagctcaacacatgccgaagcaaaatccatagaagacacaaacatggcaagctgtataacgaataaaaaatttgttcaacttgagaaaaaatttgatgccaggcttggtgtttatgccattgatacaggttcaaacaagacaatcgcctatcggtcgaatgagcgatttgcttacgcatcaacctataaagttctagccgcagctgctgtcctgaagaaaaactcaattgaaaaacttaatgaagtcatccactacagcaaggacgatcttgttacatattctccaatcacagagaaacacctagatacaggcatgagcctaaatgaaatctcggaagcggctatccgttacagcgataataccgctgggaacatcttgttgcaacagcttggcggccctaaaggttttgaaaagtcactgaaacagattggggatcatgtaacgaaagctaaacgattcgagacggatctaaactctgcgattcctggtgatattcgtgacaccagcaccgcaaaagcactagcaaccgatcttaaagctttcactttagataacacgctcacgactgacaaacgcacgatcttaaccgattggatgcgaggcaatgctactggtgacgaactgattcgggcaggcgctccaataggatgggaagtcggcgataaatctggagccggaagttacgggacacgaaacgacattgctatcgtttggccgcctaacagagctcctattgttttggcaattctgtcaaaccgctttacgaaagatactaattatgataatgctcttatcgctgaggctgcaaaagtcgtccttaacgatctcaaataatatgtttagccttttgccacaaaggaaaagacattacttttttaactcctaccgttcattttttgatgaacggttctttcataagacctctagaatcatatatttaaacaccacaaaattaaacgttattatatttaacggcaagttttcattttatggaacaagtaaagtttgaatctgacaagaattaaggctaagcaccctaaaatccgttttctttccttccaagaatatactccttagtgcaagccattataaagaagtgaacatacaatgcagacaactcccttaagtctcttattctgtgaccaatttgtaatactcatgaatatccggactcacttccaatatttcgtctcgaagacactaacatatcaaaccacttgaattaacataactgaacttgatattggtcactggcagtttcaatgcaatagaacaacatttgttgactcagaggttatctatatgagaattcaacaatttttttataataattcatatttttgtatcgttgcacttggtggatttgactcttttaatgtatggaaccacacttttattttttcacctcttttgagatcatctgtgttatcaatctcacttaatcctacaattactatgttatttttaaacttgttcataagttgtccttcagaaagatcgtaatcttcttttactggagcttttgtatcggtaatgagaattgccctttcattgtctttaagcacgacatagcctactaggctctgcatctttgtttcttctccgtgttgttcatttttgcagcctgcaaggaaaataatgagcactatcaagcttactccgattttaggcaactttctccctcccgtaatgttaaacaatctcactccataactacatatcaataaactgtagtgtaaatctatccagaaacttcttcattttctcatattgaatcttttacaagctgttaatacacagactaaatcgggtaaaaattcgtagaggtgatttctttgaatgatgatcattaagtaactcattactcttcatttattttttcaacaatcatggtattggcggtcgccatctttccacaatacacttcttggtttgtaacagttttcttcttgagttttgcacttatctatacattccaaatacatcaaacaagttcttcaaaagcaatatcttatatttcgtattttttattcattgtttcattgacttacactttagttaatatgtaatagtaatcctccctttgtgggaggattatttgtttaagcttatttctaggctgcttttgggccacctctatctataatgataaaactatctgaaccatttttttcttccgatctttgtcttcgtaaatagcaacattttggcgtgtcattaatgtaataccggccattttaaactctttttgatctttaaaataaacaacagggacattcaccaaacggatctacttctttttgttctttctcaaatgtttgtatgtggttgtcttcgaaccatacccttactcttattccgctaaaatcgagatttttactttttatgatccattattctctttcaaaataacttccaactacaacataatatatgtataaattgtaaatggagttgatgtaattgaagattaggaaaatcttattgagttctgctttatcctttggcatgctcatatccacggttcccgcattggctgctggcacttcgtctgaggttgcagtaaaaagtggtgaatatgattatgacactatataccgcattagtcctcttccaatggacttccagccaacaatagaatacaacggttatacttatacgcttacacgacattattttgattactcaatcgggttttacacggctatttatacaaaagttgtttaaatttataaaggagctttttagctcctttttctcttgttttaagcacaaatacaagtttaaatgctggtaataaaaaattcactttaaagaagcgccgcccgcaaaatgcggcttttgcacactacgccaattttatatagaaaagccagacctcctccaagaggttccagcttttcttaatgtgctatcgatcttcgttagttcaacgggaacttaatcattcggtacaaatgcagcctcccacttctagttagggctgatggcggaatatctgatggctctctacacatcagacattataagatttcaatgtagccttctgtaccatgaacgcgaattcgttgcccatcttttatcagcttggcagcattttcaacgccaacaactgcaggtaagccatattcacgggctataacagctccatgggtcatcagtcccccaacttcggtgactaggccttttatggatacaaacaatggtgtccagcttggatcggtaaaggaggtaactaatatatctccatcttctaaatcagcatcttccatgtttaaaatgacacgcgctcgcccctctatcactccggaggaaacaggtagacctacaatcgctccggctgggagattttctcgtttatactcacctgtaacgatttcaccatcagacgtgataacacgtggtggagatagtttttcatataatgtgtactcggcttttcgtgcgctgatgatttgataatccagtttatgtgtgcgtacgacttcgtgaagttcttcaaaagtgagatagtatatatcttctttttcatgaataacgcccgcttctatgagttgttcggcttctttcagtaaagcctgcttataaacgaagtaccgattaaccatgccgtattttggatattccctaaacccgctgaaattccggatgatatctatcattcgttttgtttctttggctttttgttcaccatccggtaattgcttcaatcgatctaataactcttgttctttcttcaaagcttcctgtcgcccttgctcaaatttccgatggctggcattaggctcactgttattgatattattaagaatcattgggataagtgtagttggtttttcgctccatcgagttcttgtaatatcaatttctccggtacatcgcattccgtatttgctgagataatcatagatcgcgtctcgggttttgcttccgccatcaaacttagccagttcatccaaaaaattatcatcttttacatgttgtaagtaatcaattacctctggataaggacgaatcacatctgcgacgtctaatagcgcaagacccatttctgaagtaatattatggggtacagattgagaaagcgtatctgctgcgtttttttcacctaaccactcgttcattttttcgttaatccataatgaagcattcatagcagttcgaatcacaacagaactttctgagttaaataaaatcttctttaattcctggatatcttccagaataaaacgaaataaatctgatcctgatttcgtttggatgttttgttttaactcttctatcgatgtttgactgctctcaatcaaatcagacacgattgtcggatcgttttcaacttgagccggcatatctgcattgcctctgctgggatttggtgctgttttatcatttggtatcgactttatgaaatctcgtcgccttattatggtcataagtgcgtcttttaagagctgatcgtgctgccccatgccttttaagaaaacttctctgctgtcaggggatgccagatgatgtgtgacatcaacaaatagccttccaccggctttacgcatgggtgcagcagtcgtcaacagaaaaaaagacaatcctagtggttttatgggatccgtcatcatttgttgatgaccaacagaaatatagacgtgattttcttggtcactcgcttcagggatggggaataaagtagtgattggacgactctgtacaatataaaaagtatcgcgggccaaacaccattcgatatcttgcggctggccgaaatgagcttcgatctgtcttccaatgcgttccagctgtaaaatttgttcatcagtcagtgtttgagccttttgctgatcagaatcgatctgatgtgtttctgttccgccttcttttcgtccgtagatagccaattttttagttgctattctcttatcgatgatttgcccatcctgtactttataacaatcggcagataccaatccggaaaccagtgcttcaccaagtccaaaaccggcatctatggataacacctttcggttggaggtaatcggatcagcggtaaataaaatccctgaagcctgaggaaaaaccatcctttgaacgataacggataaataaacttggctgtggccaaatccattttgcatacggtaaataaccgcgcgatccgtaaatagggacgcccagcatttactgatatgctgcaagattgcatcgacgccgataatatttaaataggtgtcttgttgaccggcaaaagaagcatgtggtaaatcttcagcagttgcactagaacgcacggcataggcatgttcctcgccgaactgggagagatagtgagccactgctttcacaacatcggaaggaatgtctacttccataatgatttgccgaatcttccggctgatgttaccaatctgatctcggtcctcaacttttagcatcgccaactgatccaacaacacttgtaacgtttcgttttgttcgatggcttttagatatcctactgttgtgacacaaaatccttctggtacttgtataccttgaatttttgataattcccctaaatgtaacccttttcctccaacgagcgaaaactgtgttttttcaatttcatgtaaaccgagaaccaaagaactcattctacatctccccttcaaaaaaatattgacaagagcttcctagcaggatataataaaattataagatggatatctataaccttttaaccagaaagcgcacgtagtgtgattatatcaccgtgtctgtttttgtgcaatataaaaagaacctgggcaatttcaccaggttctttcttaatttacataactagtcacattaaaaaacttggttcgatctgatacaatcctctaagggtatcctaaagttgggttcttttcgaactagtctgtcttgttccgtagagtccccatttatgaattagactttttgttcttaacagtcccaccgttaactagtataaagttatgaggatctggttaactactgagatatttttattttgagtaaggcttatgtttgataaagaagggttatgtaaaggtgtctgttgtgagcaagcgctgactacaaaaaattgatagcattctcatttaaataccattctattaacctatagaaaaagttataaaaccagatggagaatatcctacctccagtaattccaaggccgttcacctagtagaaaacaacctttaaccattactaacgattttaataatcattgattataaaacttctcaaggaacgatcatcagcccgttagctacccctgattaaagatgatctgctaccacactgttacgttagaacttccactactttgatatccttctgtcgccatgacttggtaagcccaattactgcccagattcattccatggctcttccatgcgttcacatgattgctgaaagtgattgtagcgttgcttccggttggtctcttcgtctgacgaacactccagtactgcgtaaaagtagtgcgatcgccatcaatggaaggtgcgttataacgtgtagttgtatatatgtcatatgtacccccatcactttttacagtacctttatacgttccggtaggcctataagtaccccatgaatccaccacataatattctatgaggggcgatctcgtccaaccatataaagttaaatatccattgccattcggtgcccaaactccggcattatagtttatcgtcctaaatggcgaacctgtagtccaacctttaccaacaacaaaatttccggtattagaccaattaacactgtaattcccgccagacccattgacagcgtttactataccgcccccatcagtccaattttgccagtagtctgtgctagctgcagaggcggttgccgaaaacaagctaatactcattaaagctgccgataatccaactaagaaattctttttaaacttaaacatatgttacctcctataatattttttccgactttgaggtagcactcgtatacatttaaaacattcttaattactaacgccaatgcttttgatcgtccccttcagtataataacacgaattcacgagtgaatattaaaagtatttgtaatttaattacaaatacctagaaacacattataagtggtcttcttccaccatatcctgatccttttttcgtaggatcacaattcttgtttctaattcagatggagtaatatctgcaatgaattcccattgaaccatttcaaataaaggagatacacattagagattgtgaaattattgtagctgccgcttgtctaatgaagggaagcaaatttatgaagaatatgaagaactgaagaagaaaacaattaaggttatactaagaaagaactgctcaattagaattattgaccaaaaatttgaggatgatagcttagatcagttttacaaagaagttgcaagatttttatttgaaaggactctgaaaaagaaaaaaagaattgacaatcagggtaactgtgggatgtaaccgagcctccaattcaaaataaaaatctttaaaattcttattttatttaaagagggactgtatatccctctttaaaattaagctttagattgctgctgaaagtaataaaaattgtacttttgatcaaacccttcttcgctaccacaaagaaaaataatgaattcaataaatgcgataatagaggggataccagtccagcaaaacaaaatatatagaataccttgtcctactcttcccaaataaaacttatgtattcccagacccccgaagaaaaatgctaataatgccgctacaattttgttcttcttgcttaccatgacttcctcctagctcattgctgccatttttaaaataatgctttcacattataatgcattttccaccagaaatcgcgaaaatttagaaattcttttgagatttttttatttaattgagaaatgaaagctcatataattgaactagatggttttgggaggtgtttattcaaaatgtatggcaaaagattacgtcaattacgaaaggcacacaaattaacaatggaacagttaggcgagaaaattggaattgcaaaatcaagttacggcgggtatgaagctgaaagcaaaaaaccaccattggacaagttgattattttagctaaactatacgatgtttcagttgattacatacttgggttaacagatgatcctgatcctaaaatggaaagaaaaaacctaaaagagtttttagaaaaaccagatattcactgggatggatataaacttacccctgagatgttagatcctatacggaaaattttgaagttggttactgcaaacaacaattaaaaagagcccttatgtgggcatttgcataaaacaattattttatctaaatctaaaaatttggattccaagcaaattcaatgttaccttctgttcttacgactaaatctttgcttaatctctctttgttaaccttatattctttgcagcttaaatattgagcttgtgcaatgaagttatcattacttgacattatgtatcttttgcgatcacttttccttccatactctttaaaaatatccataaatataacatctgctggcatcttaccatactttttatcatgcgttatctctggaaagttttctaaatgtctaaccttgtctatgattcgtacaatttccttcttcacatgacttctacgctttgaattcttcatgtagatctcaattttaaaacgttttaaattgtttgtacttgtgtctctgatatttttaacgatatactcttcttccttaatatcgtgataatgacaatgcaaagtataaattccgctaactgtatcatcatcttgaaaattcgcaccaaaaagactattcctacttattttatcaactaagtattgggcatctataccgttttgaatatatgcaataatatcagctgtatcagttaataagaaagaattaatttgtttgtcgttattaaatgtaaggaaaagcctatcggactcaggatacaacataactaatttaacaaaggtaaatataccaaactgaatcaattcattattagaaggaacttcatatgtagaaaaatagaggttgacttggttgtttatttcatccacattcaaaagattacatcttaaattataagttgacatctcgagttttatccaggattgataaacaatatcggttgtattcgaacaaattgactgagcaatgctcttataattctttacattaaattttacaataccggctagcaatccgttaaccagatcaattattttatatatctgtctcttaaattgagaaacacttacttccttacttttaggttttcctctgttagtgaagttaaagataattttatctttctcttttagataagttcccccatggttaatagcatttctaatatctacatcaatttcctttgttaaaattgtacacccttttgaattaagcaaattgactaaagggcctagattattttgacttaacaagtctttatcatctatggtgttaagcaaattcctcaaaaatttatatagattgctaactactccttcaactaacgaattatataaaggcaaatacttgacttgaatttcagtgtctctcggaattatagttttattaaataaattcaatgtactcagtacacgatcatatgatgaaagggctaaaaaaagttgtctagactgtctctgaagttctcaaaaaacaaatcagtgttaacgttcttgcattttacttcatcaattaagttgtaaataaaatctttaatatctttattccaaaactgtttctcctcatcaaatattaaatcataaattaacggaagccatgtcttaggtatatattgtatcccctcaatattttggtctattctctctttgtacaccttcataactaattcactatcaaaccccatgaaatctaatgatccaaatgcagcttcaacgtaatcactgttcaattattccctctcctagctcctcatttaataaaaggattcttttatcttaatagatgttaaatttacactctccccatctatttttaactgtctcactttctaattttaatttgaatatagctttaatagttcttccactggataactatctgttttatttatctctataaaatattctaactgccaattttgggttttaatagcttgtttgctagtgggattctcccatctagggtaaactcgaattgccatttttccttttgtgtcggatgttttaaggatattttgttttacaagaacttcttttggaaagacaaattgtccgaaattattatttctagtaaaagtgttgataaccaataaatcagttgccttttcatatgaaaaggcttggtttttaccatctccatctttttcccaaaaagaaacaaactgtcctatcttgttaggtgttatttttgcaactctaaatcttaccgattttgaatttaattgaaacatacccgccccatagtctgaattttgagcttcttcctggatagcatttagggttaagcgattaggtttatataaaactttatttacatatgttaacgccttataaaattcattcaatgctttgtttgtactccttatttatcgttgtattgcaacctttttcttatccatcttactcgacccctttcaaaataaagtaaagccaagcaattctgaattatttttatttctttttttgactcttaatttaatccattcttcatcatcagaatatggtttcttggttgttctataccatccgttaaaatgagcaactaactgaatcattattttctcagcttgacctttagagtccatccctaattgtgtaaaaccatttttactacttagcggatctcggtctcctggcttatcaaactgtttaagagctatgtagtatctcctgagtctgtaccaaagagttatagagccaccaaagtgatcccgatagtgattaacattaagttttggtttatagccctttgactttaaatattcggcaatttcttcagcgccaaattcttgacctatttgacctctttctttaagcacattctaaaccccactctgaataaaatgattatttcattactattatactacaattttccatggtcacactaaacaaaaagcagtctattcagatctgctttttattgttttcttcttttaactttttgtttattttgaacccaattaagatattgaaaatagctgctggaagatataaaactcctgcacctattattcctaatgcagtacttgagctcactataaatgtctgcatttctgtgtttcttgacttcaagcaaagtaatactaggaggccagctaaaccccccataagccgtgcaatacctggaataaagaaatctgttaggactccaaataattgccctataattgatagcataatccctaaaaaactggacaataaaactaaatttttaatgtcatttcaccccttttcaaagtatatcatcgggctcgtcatggtcaatcccatatttgcctttgattttctcgttcccacaaccaggattcttttcgactcataacgagctctcactagctgcgctcaatgtttttggtaataataggattttacccaatgataatttcttcccttattttcacaccattcaataaatccctttgattgtttttctgtaaacaacacccagtcatttaacagatcttgataatagttaagtgcttcgttattgttatttcttgtttgttgacattctaccttgttgtttaactgtattgacttaataataagtgctgtatcttctttaatatcgccaaggtacaaatcttcggatatatgatgaaatgaataccaaagtgcgttcaaatttatatcgattagcgttaataaggataattgttcattgctgccaccaagtctaagcgcattgtgtaagtaatcgacacgtttttcagtatttaaaaacacgccataccacctatatggccttggatcttccggattactcttcatccatccctcaagtaaaggctttaaaagttcctcttccaaaggatgaacgagtacatggtgaatatcatctgatgtttcaaataaatcaaatagccaacatgcaaacttctgttgggcattattatcccatatctttgcttcatcaataaaagaagataatgctttaaaggattccttacgtaaccctttttctttgagggagcagaacttttgaaataatggatattcatccaatctgtcacttttcaagatattagttaagatatttaccattgctcacatctctcttcgtttagaatcaagtccatgttatatttagcctttgtaccttgctatatcactaagaataacttgatttccattttcctttttctacacctggatgcatttcaaaatgattttaattgaacttgaaagtgatatgtacaataaactgagttgctatcttcaactataaagtatgtatcttggattaagaaatttgtaaagccaactgttttgagtatcgctttactcctcatgagcatatccatctggatatcattatcagttagaaggtccaaattaatagtaaacgctgtatgtaattcaaagaaagaattatcaaatttaaagtttaagattttcagacaccccccccaccttaccgtttcctttattatacagcgtgatcttatctaattaaaactgctgttttatacagaaaataatgtcctttgttcctttccctctcccgtccattgcagatgctagccacttcatagtttctttaatatagttttaataataaaagcttcatgaaaaaaggtgattttttgcccgcttgaacgccccctcaacatttttaaaaattccatgggcgtttcagtacattctcctttccaagtttttgtttcattgcctaaccattctcccgggtaacgtctttttcagatgacactttaatctctccattctgtgtgaaattgttgtttacttaattagatgccataacaaaaaaagcttcctaacttcagatgctggtacgctttctttcttaatatatgaacataaaacgactacgtgcattctcttgtaaattcaacctttctatatttagaaattttaatattcgaaatttatcctttccctctttacttatatatggaaaaaagtattatttacctaaatgaaaaatagttaaaaacgtagcagaaagaggttattaaatgaaaaagttatttgttacttttcttgtgctaatctccttaaaaagattgcactagtaagtattctctagctaccttgtcaaatgatgactgcaaaacaagctggggactatgtattgtgttcccaagtaaagaagttaaactttattctccaaagagtcctataaaggtagctgtattagatagtgggattaatagctctctgtctatttttgaaaatagttcaataacctcatatgatgctataaaaaacaattccactacaaaagattctttaggccatgatacagccatagcgggtgttattatggctcctttaaataaacaaacagtgcaaggaatatctcctcaagtgaaattattcgatgttaaggttcttaatgataaaggaggtggtgaagtccactctatgaaacaagtaaagtctgaatctgaagaatatgtattttttgagcctattttatgtaaggttaagcataaatttaagactaagcacggtaaactccgcataccttccttcgaatcctggagagtgtaatctctccgttacataactccttagagcctagcttttaaaatccgagtaaaaatttagtacatggatcaattagttgctatcgaataagaactttagtgaattaattgctcatgtcttttataaatttgaattgtccttttttatctaattctaaaaacaaatcaatccgattttgtgaactacttcttcctctaacttcactcattcttcactcatttttgcttgaaacatttcttctgcagatacttcatgagctttagcgatccaataaatatcttttaacagtttttgtgcattattatatgaccagattgtgtatggaaaccgagtttgaattacagcagtttcatcatctggagttgctaccgtatatggtaatgacctgtcaaagatctcagtgtcatagtcataccacaaccagagcatgtcagcagtattatgtatgtaatatcctaagtactctcgttgaaagttcatctgttcactcactgcttttaaatagaataactattttataatctcttcttaataccctccacttaaaatacagtataattgtaacttggatacactaatctatttacatataattacagtgtatttcattaaaaaatcaggagatgattttattgaaaattaaaaaggttattacaagttccctcttattaacgtctttatttatttccgctgctaccgcttatgctacacctgctacctctgttaaaagtcaagatgctatccgaatccaaggagatcaaatggaaatgactgtcgtgagatactacacccaagaagaatcccgtagtatcccttatacgattcaatatgcagagaatggttggtacggaaccttgactgcaactaattggaaacagcaatctgatcttagagttagagttgaatatacagggactgtttacttaggacaataataaatgaggggcgactagtcccttatcttatttttagttaaaaactatcttttattcaatctctatattcaacccagttgatctaactttgatttccctcatctctccaatctgtggcatatataaatgtttcttttcattagaaacaatttcacccttccaacaaccgttttgcacaaaggattttgtcccgattggtaaagtttgaagatctgcgttctctatgtattctccctcctctctataaatatctccttgttcagaaatcctccttttcgaaactttaatgtcgattttgtaaagtgaattttcatcctcaatcattaatttatatagccaatcagttatttttgattgctcttcactaccgttaaccatatcgaaaatcttcctgtacatgtcattcctcttcttttgaaaaatacttgtctcacctctttaatagttaaagtttcttgattttgcacttttccactcattaactatccacttcatatgtattcattaatttaatgataaaaccacgattttaatttaactttaatatgcaccatcttgagaaaatcccctttaattggtaaactcatacttaactttttatatacaagtgggtgttgccttgaataaaacaatcggaattgttggattaattatcagcatactagtgcaaactttttcggccgatgaatcgctatcgcataagattgctacggctttgttattggtatcaataatgatttataattttgaacatgctaaggattattctaaaaagtcacttgttattttaggagttacctttattcttttgatgctaggagtttatcaactgctctcatttaccagcgattactttgaaaagcttaatgtgaattttagatataccctcttatttgaaatagcattaattattgcattggtaacgattgcagtaaatgtaatgaagtacattgcgaatcggttaaggaaatcgactaatggtaaagagttatagctctttgccttttttatgctaaatgcttctttctatgcggtcttttatgtatgaaatcaaatgctaaatcaacttttctctggttccctttcctctgttactcgctgagtaacaacaataagttgaccgttttcttgacgatcaatactcttaactgaatatcctttagaaccgtaatattctccgataatctcatcaacgtggttactaagcagattcctctttatcacctgaaaaacctccacttattttatttttattctttattttttttatgatttcatcctataatccatctctccatttgccctctcctctatcacgacattaaccgacacacaatttccatatatatgggagtaatttcgctatttccccaacagataaatccatataatgtaattgtaagaaaaaattataagaatgggggatttacatgagttacaaaaaagtaataacaggtgttgcattatctgtaggtttacttgtttcagcatctccagcgttcgctgcaagtactagtcccgataaggaaatagtaaatgttgcaagtgatgattttaaagctcaagctatcaaatgggatctacctagtactactggtatttttgccaatacctttgaaaaagacggtatccgctggtatttaaaaggtattacaaaagtctcggaaggaaattggattggccactatgaaggtgtacgaatataagatcaaaatgggggggcatctagctccctttttaaattcatagtttgccagctctatctggttaaagtaatccttttaaacatagttcaaaagcacataccaattttgtatacatccccattaatacatctccctctctttaaaacagtctttttatcaagtgtagtgctactcataaacaacaaagacattatgatcatcaacaaacatttcgctgccatcagacaagtgtatccaaaaagcctcctctggttcatctctatagtcataaattgcgactacctttgtatttgattcttcactcactgactttctgacagttatttttatattatcttcaggcaaaataattgatttaatcattcacttcaatccaatcaaggtttgtattgcaccgttgtgcttcaagtaacatctagtcacaagattgaaccttattcgttaatacacttggtcccaacttttctgttctagcattagaaagacgcacttgaactttaacattcttcatttcggctgtaattgagtcaatccttccagcccaactaggactgtcttcaggtgtaggataaagtttaaatcgccaactaatctcacctggtttagaagcaaaaccttcgtaggtatcgtaatttccatatgaagatggttccggaagatgaacagcaagaatacttatattggttcttggagcactaggcggatttaattgcaccttataaattaatgccacgccttttacatttctaaggctctgatcaacaggttccattattacactacaaggcattgtacttgcttttacttgaattggataggcaacagcagcagccaataaggatataaccaaaataaatcgtctcatggagagttcctcatatttttttggttaatttcccttatttctggatcgattattcatatgtatttgatctggacttcaattttattttgatttaatttcaacagttaaactgtctggatagttttttaaatcaagtgcgtttacatgacagtgacctacattttcttctttatcaacgtaattatagaagaacttttccccattattgatgatgacttcgccatgatgtatgtactccatctctgatcccttgtaccaagttaccttaacctttgtgctaggtttgattttatttaaatcaaatactgttatttcttttagcaagttcatttttttaacctcctcttctcttttacttttaatctaattccctcatgtcctcctgctgctcaatataacttttaaagtcctcccattccctatcaatttctttaatattcctagcaatataggtttctgtaatgtctggatcaaccaacttttgaagagaaagttggtacataaattcaatctttgatactgtttctagaaatgactgggcataactttttgctctatttaagcgatattgactcattccatgttttgattcctttattattctcactcccttttaatcacattaaaatgcagcttttatttagacttcatcagcttgtctaatagtgtctaacaactctttcttcttgaaatatgtctttttccaaacgatccacttccttttgcaattcagtagcagcagcattcttcagaatccattctcctactccacagacttccttttgttctttctcaaacgtttttatatgttgatcttcgaacctaacccttactcttgttccgttttcaaattcattattaaaagcagctgctttcttttattcttcaagctgcttaatccttttgttgttgttaaatgagttacttacaatatttcctgattcacgagtagtacttataattaataatggaaagcttatatcacctttaggtcttaaaggtacgttgaggttttgactcggttagtaacttttggagaggagttgctgaccatctttttcattaaattaattgcatacagaaatttaataatggaggaatttagattgctgcttaatgacagagattgctgcttaatgacagagaacgttttttgcttgagtatcttcttgtttctaatcggatcaaatcgtcgtttgataccttctaatatactcactatctctgtcttttcttcttcaagaaaagctccaagaaaagatccttttgaaaattctggtttaaaggatctaggactatctatgagctcaccatttgatacaaatatactcagtcttatgtccttcgatgtcttacggaagaactgtttgataaggctagagctctacatagaaatatcggtgagcgtgtttactttttaaagtctgacgtctgcattttgtatcatgagtggatatcgtgacatccatttgctgcgacttcttttcaaatgaaatgaccaccgcaaaagaacagattagcaagcggttgtactataataaacacctaatggatacttattttaaaggaaagattgaagagcataatgtcattacggattgcgacattgataaggtgttacataagatgtacttaagatttggattcagagagtataaacgaaacaattatgagcatgtctttgatcttttgggtatataataagtcttatactgctttttagtaacaaatattggatttcgagtttttttcggctgactcacaaattcgaatgaaaatcaagggcaaaattaaaaaaatgaataattaagagggtgtataaggcttaatattattaatcgttaccgtaacagcaaaaaatgaatcgaagacttatttttatgcaaattggcgaatatcaataacgtcttagtcataatacttaataacctaaagcaaaggctgaatttatgaaagggttattttagatgggtacatataatagaagaaactcgtcacagataaatcatttagatggacggtgaggaacttaaataagctgcagaaggaagatatgaagttgttcaatatctccttaaaacaaccactttcccctactcccgcttatgttttacgatcgtttaccccctattcactaattaaagtatcaaaaatccttatgtttactgtcttttttagctcattataaatttttacgataagcatgttattcgtgtacgatatacgacttgactgtaattggtgacgatttaacagagatatttaatgcacttctaacttttttaactgcaatgggaatcattgttgacccaacaactcaaggtatttctgatagtgaacaagcaatggattatgataaaccccctccccttctcttaattgaggagggtatttttttcgtaatgaaaaaattgcagaaaactttacatccttttacaattttttcaatgactatgttatgattgttttcgagagatttttgaaattttcagaaagaggggtttggatgagtaagatcgcttcagaagttgtcgctactacactgaatgactggtacattgctataaaaaagcaaaaggttgatgagtcaataaaatattattcagagataaagaaactttttgatgaaatggaagaagatcaagaagttcttgcgtattatagtttattagaagaaagacataaaatgttgctacattcctcacgaggagaacctttgcaaaagcacacctattttactgaagacaatcaaaacttcattaaaaaaacaaatgataaattagaatacaacttttatctatttgaagcaatgtatgaggcatacaacaaaaactatgatcgagcaattaacttatatggattagctgagaaaaagcttgcagaaattccagacgaaattgaagcagctgaattttactctaaagtctcttacttatacactcttgttaaacaaagcattgtggcacaacattatataaaaaatgcaatttcgatatataagcgacaccctgattacaaatgcaaacttgctacatcaacaatgattgcagctgcgaactatgctgatatgaaacgatttgaggaagcagaaaaatattacttagaagcaattgatattgcaaaagaaacaaaagatgaatttttgaaagctcaattatttcacaatcttagcatcgtttattctgattggaataaacctgataaatgcatcgaatctcttgaaaaagcaataggaaatgaatcttggttacattcaatttattatataaattctttattcatgataattaaagaactctttaaaattgacgaaaaaatgaaagccattaatttttacaataaagcacaggaaagactcatattaatggagaataaagtatacgaagccaaaattagcatcttatacaacctttattgtggtgaattaaaaaataatttcaataattgtattagtaatattgagtttttaaagcaacaaaatgaacttgaaagtgtagatgaattgtcctacatagctgcaaaaaggtttgaatcaataggtgcttttgaagaagcaacgagctttttcaatgcgaaaatttgggctgaacagaaaatgaatcaggtggagggaatcttatgaaaaaacttgtgctttgcgtatctattttagctgtgattttaagtggagtagctttaacgcaattgagtacagattcaccatctaacatccaggtagctgaaaggcctgtcggaggttaaaaaaggttgattaattaatttagccctactcatacacttgagtgggcttttattttatgatttatgtccaccagtcaacccagctctgtgaagcgctgtacctgcaaacgtaactgagatatttctcactgttttgcccgagtaaaacttattaaagaacatcaagcaacacttataaatatccatcgtgatatttgtgggaaaatcaattgttttggatcgatgaaatccaccaccaagctcatctttactgtaaccaattccaaggctgatcgttcgaccaactttattatgtgtacatgcccttcttgcgacttcctcacaaatttccaaaagaacagccttaatctcttctctccttgtataatccctcagtaaaatctgactcttatcaaaactaatctgaccttgcatcaactgagcacctatttctgataaatcaattccatgcgcatgatagtacaactggtttcccattattccgaacttcttttcaagcagctctaaaggaaatttagctaactggcctacagttgatatacccatccgattcaggtttctttccatcctccctcctattccccatattttagacagtgaaccttccagagtttatttggcacatcttcatatctccaacgtgcaataccactctttgttttcttactctccaggtcaagcgcaagcttactaagcaacatattgtcaccaattccaactgtgcacatcaaaccaaattctctccacatgctgctttggattgctttggccatttcttcaggattctcttttcctgcatctaaaaaagattaatcaattgaatacgtgtggacacatttttcaggaacaaatctgtaaaacagctttgtaatctcagttgaaactctgatgaaaagcttcatttgtggatttacaatgtatattcttggatcttcaggtatctcaaatagtctcgatcctgttttgattccaaaatcttttttaagtgcaggagatgcggctaatactacacttacctgtctctcgatatttcttacaacagccgatacagaagtataaaacacaaagtatattcttacgtagaaattgtgagtaatcaatcattgtatgtaactccttgttatatatactgtgttgttatgttgatctttaacgtgaagcttgtgttgttcaaaattaatgtaatgaactcttccggcggcattttcaaacaaatccatagttgtaaagtttgaatttcaaaatttaagtgcttcagaaacgagaacgtccatcatctcaatttttgatccatcaatcaaatcttgtttaagctgtattaaatgttctagcatcattgatgtccattgattgttcctcgatccctaaacatatcgactcactccttgattgatctaatatcaacagaactaatgttccttattcaatgcagataagaacaaacgttcgatgtaaatgttggtaataaaatataaaggtcaataatgatatccgtagtattaataaaggagagattcttttcgacgagggagagtgtgatggtgaatgaagaagaggttaattggatttttggtcttagttcctgctttgattatgtcgggtataactttaatcgaatcaaacaaaaagacccctgtagaagttttagaaagtgcttgggatgaatttgggttatttagttttgaaattggaataacagatccggcaattacaataggcatggatcaaaccaaaagtgaagcaaaacttcgtgaatatttaaaagataatctgtctagagaagccaaggaaaaatataagatttatatattcaaggacgatattgttaagcttgagaaagagcatcaagaatatttgcaagaaaataatctcaataagtaaaacgcccagcacttattgagctgggcactgtttcatatttaaattgaatttttataagcattaatagcttcgtttcgcaacaacatattatttttgttaaccatgcctatgttgtaagcttttttgataatatctaatacctgtgaatctaatgcagagagattacctcccggattaaatcttgatttccaataatctaaagacttatttaggtcaagtgagctttttttgttctcgggtttaactacttcatttttctcaagtttttcacagaattcactaaaactaattgatgaaagagtaggattatcccctccatacccttctgtagccaaactgcaaaatgctaagaatttcggatcataaataagatcgcttgagtttacattcatcacagataatcacaatcctctcagagctttttataattgtattaccttttccatttttacacatgttaaatatcgacaatccctcaaatcatttaataaggttatgtcaaattttaatgttgataaatacgcaaaaataaaaggaaaccatagttccaagtaccttttaggctttctaaaccaatttttacagcgtttagtccctttttgacaacagttgtgtttgaacctttttctgtcgtgcttttataagcatttgaaagtttactaaaagttgactctaaagatttaatggacaaatcttgaatttcttggctaacaatcttcatttacaattctcacttttcgttttaaaaacaacacctactcaatagttgaatttaggactacgccttgaattttgcgattcgcaaactatcatatcagctacagctttaaatgtttttcttagcttcaccatttgtgaccttagtcccttgtactctttggctcttttatccgcttcagagagcaatgaatcagcttcaaataccttcatttcattctcctttcaagcctactctatgtaaatttcaccacaattatttgcttgaataacagaaaaagacagccagaactgactgtcttatacatcgtgcgatcgtgttctataataattttctgcggtatagtagcaccattcccaaaaagttgccccattggattctatataccgatctagaaatatctcaaaatttaaatttaatggtgtatattcccctatttctaatataaaaagatagttgggatcccctttatccaatttatctttgtcgatcatcaaatggcacccttctaataagtgaccaattgggataccattgatgccttcaaacaaatcctcatattttaattcttcttcaatctcttcaaggctaaataaataaagtcctccacctatattctccccatcagaaagaatttcaaaaattttcgcaccgttatgtagtgtcatgaacttctgataatcctctggaagggtaatctgatgtttagcttcaaaactttgaatgtcgttaagggttgctttgtcctgtgaaaatgtaacaaggaactccatgatatctccttcagaacaaaacaattgaatggctcctttttcgtctaaaagacttttcaagccatttacagtcttatgaacaaagttagtcacatacatcacccctttatttccttttaacaataacctttcaaattccaaaagatgtgaacagatcgtgataggtgctcttttcagtgaatataatgcaataaattctaaaaagaggtgcctctaaaaattgaattctctaatgaatgatgacatggtaaagatcattagaaatggccttagcgcatcccagcatccaaagcatattcttgttgtaggagctggattgtccgggcttgtatcagcatcattgctgaaaaatgccggtcacagagtaacgattctcgaagcgagcggcagagcgggcggccgtgtctgcactttgagagctccctttagtgatgatttgtattttaacgctggcccgatgcgcataccgaataaccattcgttaaccttagaatatatcaaaaaattcaaattgccaacaaatgtatttctcaacagaaccccgatggacatcatttatgcaaatggaatcaaaacacgtctccaagtttttgaacgagctcctggaatattgagatacccagttgcaccaaatgaacaagggaaaacatctgaagagctgatgctttctttactgcagcctattctaaattttatcaatcaaaatccagcgagaaattggcggattgtcgaagaacaatacaaaaatcattcgttaagctcttttttaaacacgtatttttcatatggcgcgatcgatatgatcggtgtacttttggatatggaagcgtatatggggatgtcccttgttgaagtattgcgggaatctatctttttttcatcgcccgctcacttctatgagataactggcggcatggatctgctgcctcacgcgttgcttcctcaattaaaaacaaacattctataccatcaaaaaatgatgaaaatttctcaggggaaaaatcgtgttacgatccattgtcagcatcaacaaacggcagaattcacatcattcacagctgatctcgctattgtaaccattcctttttcaacattgcgatttgtaaaagtcgaaccataccattcattctcttactataaacgaagggcaatccgtgagctaaactatatcagtgcaacaaaaatcggcatagagtttaaaagccgattttgggaaaaagccgggcagcgcggcggcaaatctattactgatctaccgattcgtttttcgtattatccaagcagaaatattggagcaaatggacatgccgtcattctggcaagttatacttgggctgatgaggcactgatatgggacagtctttcagaaggagagcgaatccagtatactttactgaatttatctgaaatctatggtgatattgtgtggtctgaatttgtgtctggcacttcttttagctggagccagtacccgtattctgcggggggatttacagctttcgaaccaggacaagaattagagctgtatccctatattcctgtccctgagggcagagttcatttcgccggagaacacgcctcactcactcatgcgtggatgcaaggcgcgattgaatctggaatacgtgttgcttatgaggtcaatcgcttaccttagatcatgctcacatcttgttaaaactggttgatataaaaagaagtgaagaatttatactcctttgtttaaaagattaattcaaatatgggatgtctcaacattcagttctttattatttttatacacgttttgaatgcggacctcccttttcttccataatcattaataaatacccaaccatagaaaacgttttaattaaccatcgggcgaactttctttcactgtataacgattcttaatgttgcttttttatcctttacttgtcctctctttttttcattgacttacatttcttgaaaaccagtataaatcctaaaggaattttgtaacaaatacagaattggaaagataagcgccaaaagaaatgctaactccttatctcaaagacaaaactgcgcttatattaaaagaaagaggtgtctttagaatggttcattttaaaaactgccctgatccttctctaaacgccaattctcagtctcaccccgaattttcatccgaattagaacatattaagacaagaatgcaaaactttattaagcactcggttacagcccaaaatatcgaagttactgacgcaagggtgacggccgaaggagaggtcacctctcttttaaaagaacgtctcgacaaggaatattataggcttttatctaaaatcacccgggaagtaaatgtggctgacttcggcgctgttccagatggaagagacaatactgaagcttttcgaaaagcaatcgggaatggccgagtcaaagtacatgttccagcgggagaatacctcgttcaagggattaaacttccatcttggacaacaattgttggacaaggtaaagggatcacagtgattaaattgcatgaagacactccagcgcatgaatgggtgattacaaatgatgattatcaaaatggaaatcgcaatatttttgtccaaggaatgtcattagactggaatccaagtagacaatgcggtgtgagaaatccagggggacagttctccagttgtttaacttttgctaaggttgaatatgggtggatcaaagatgtggaagcgattaacgcaggtcttcatggtattgatattacatcgccaacgtatgaccatttgcctgataccgattggacaaaagacggatcaagatatatttggatcgataactgtgtgacatatggttcaggagacgacggcattaccacccattatagcgaatacatctttatttcaaactgccattcaggaaatccgcggggaacagaatttgctgaaggtgtttcaaactccaacggaatagaaattgacgacggctctaggcatgtgtggcttttgaataactttacaagcggcaacatccgcggagttgaagtaaaagcccatgaactgtggccagcctctcaaaacgtccatatcataggccatatttcttatcgcgatgttcgtgcatttgatcttcgtcatattggtcaccatcaaattacagatcctgaaagcacaacagcatacgatgtcacactcattgattgttcagcagttgaaccagttttcaactcgctttacgatgctgtgaccccaagagcgctggttatttcggcatataaaaacgttaatgtaagcggattcacagcgattggtgatccagactatgattataaagaaaaccctgtcgtagccttgcaatatcgcagccaaaatataaccattaatggtattaaaattcgcggttttaaaaaagccggtgttgatattaatttatcaggcggatcaaataaaactgattatattaaaatttcaaattttgatatttataaatctgctccaaaaggaatttcaatcggtggaggcctctacaatgtcaatattctaaatggaacgatgattactgacaatgggacagttgcaattcagtcccccaataatcaggccacaattctcggtgtacaatcagaaggttatagtgtggcagcctcaatcaaaggccaaacataccaacaagttccaatcaatttgaaaggaggcatacagcttgcaacgacctctggctttgccgttaaccaaacaagcgcagttatagcaggtaccggcgacattacggcccgcggagaaagaaatgcggtcattagctcttctggaggctccagtactgaaggctctcgcgcattaatcgcttcttcaaataacgcacatattagaggaaaccaagcgtcaagaacaatactgtcttctgaaaatattatacttgaggaaccatacaccgtggcaggaggtcatcaatcaataaagtggcttcttgactctgttcggggaaacgggacgtttgccggtgcaatcagttcttctttaggtggatatggagagtattttgagagttcaactggacagttaatccatactggtacaatcgtgactttaagaggtgaaaaaattgtgcccgcgaatgttggagattatatgcttggcgttatttcagaaacttcagctttcatttcaggagcctccagtttcgtctggcagggccgttatttgacaaatgagttcggcggatttatttatgaaacggtgactgatgaggaaagcggtgaactcatacgtgttcccaaacaaaatccagactacgatacagcgctggaggcaaattatcattcacgggcagcaagagacgaatggcacgttgtagggttggttggccaacattatgtgcgtattgacgaaactgtcaatcaaggagattatcttacggcacataatggaataggaacaaaagccactgaaggaagctggaaagtaatgaaaataacctctgcttacacatcagaaaaagggtatggtatcgctctaaccgtcatcaaatagtggatacgccgaccagttcaatatatgtttatccaaataattagatctcttttctaggttctttattccttgtatgttattatcaattttcaatatctaccaaaacacccctaatatactatcgtaattaacttatattataatcaaaaaaattttgacagctgttccttctcgttattcatgaaagttgctattgaaatgagtaaatggatatcatattagacttctatagcaaatacaccatatatatcctttaagtatttacaaattgaaaatgtttcatgaggcttattaaaagtattgttcttttatcatctgtaagtcgatacaaattgcattaagatcacacctaaatcacactgagttttttcttacaaaaaaatgaaaaccctttccattctaaattcatttcaccgttactaaaagtaatccttgcattccttcgcccttcatgctatattcatatagcgatgagctgaattgtgtaagtcgatgtacatgcctttacggcacacacgaatgtggcgtgtggtgcatcgcctcaatacgcaaagacgtttgccttaggcaaacgtcttttttgtgttatccgatttttgtgccgtttgaaacaggctgatccggctgcaaaaggacgacatcgccctggccgggtatgccgccgaggaccaagacttccgatttaaatccggcgatccggcggggcggaaagttcacgactgctatgacttgcttgttgacgagaccttccggctggtaacgcttcgtgatctgcgcgctcgattgttttatgccgatttctgtcccaaaatctattacaagcttgattgccggtactcttgcttcaggaaattcttccgcttttacaattgttcccgttctgatatccaatttctcaaagtcttcaataactgccatatcaataactcctttttctcctattgtaaaggagatatacaatattcttttaactaaagagccatcattttttatccgaatataaggtgtttcgatacaggcggggcggcattcctgtgcttttcgtgaaccatcttgtaaaagaagaaaggttttgaaagcccagcgcctcgctcacgacggtaaggttttcatttctctccatcagcattcgttttgcttcctcaaggcgaaggtcggcaatatagttctgcggggacttccctgtctgttttttgaaccagcttgaatagtaagctgggtgataatgctcgatttctgccagcttcttaatcgtcagccgctcaaataaatggctgtgaatgtatgcaattgaggcatagctatgggattgaagcttttcttttatgtattgtactagcatatgaagcgagttggctgttccggcctttgcttcctctgtcagcaagtacctgatcgaagaccagaaaggatcgagtgcagcttcaattcccgatcctgcacgatactcatcaattttcattgcgtgaagcggaacatccagtacaagacattcatttcttccgatagaacggaagcgatgctcgcactgcggcggaatatataaaaaatgatccggatttaatttcacctggcgcccctcagtctcaagatctatactcccttcaagcggaaaaagaaattggctgtacgcatgcttatgtgaatgataaaggcgtgtgtatgtccgtttttcgcaaatcatctcttgaagcgaatccatcagcaacccccttcctttggtcatcttttaatccggtaatggtgttccgatataggcgaaaatccgattttttcatataaagaaactgccgccagattttctttcatcacttgtaaaaacatgcgttccgctccgttgttttttgcccattcagtcaacatcctgatcacttgggttcctgccccttttcctctgtgctcctcagctacaacgatattactaagtccgccataaccatcaatgacagaaaccgtgccaagcgctgtcaggctttctttgtcatacatcttgaaaaaagttttacacggcggcatgcgttcgaatatgtgtttgtaacctttgtgacgttcgggtgaaaacccttctaattgaataaattcatctatccaaacagatgatggctcttgttcccacttgtatgtaaatcggctgttgtcatttgttcggctcataattgaccggcacaacgctgtcatctggaagcactcgtctaccttttcataacggctgtctgccaatgcgtcatcaagccctttcggtgatgcgttgctaatatgaaaacaaacaggtaagcctaaactttgataaaaaagttcggcctctagctgaaaatccccttcaggcatatccgcagacgtccatacgctatttgcccttttggttacgccaaaattcgctctgagaagccatttccctatgcttttttgaaaataagccggccatgaagctgccgctaatcgttcaatcttgcgaatgtcatccattgcataatgcctctcccctatgtatactcccttgatattatacaatattcagaaatataagacatccatttatttgtttacataatatttttattgtttattaataatcctgacaaaaatgtccgaattgaaaatgacaggctttctaaaatgtcctcctcacgttcaaatgcttcttttgcgattaaaacagtaaagccatgcagcagacttctgagcccccttgtcgcatgaatggcagtcttttcacttgcatagccgttttcaatgagcagcttcgtcacaagacagacaatttggtcagagacgatttccgtccgtttgtcgtgaaccttaagaagagccgcttcataatatccgggattttcaattgcaaaatcaacatatgcatgagctaaagaaagcatcgcggaatctccctttcgttcggttacggagtccgccatttgatcaaaaagctttgtcagtcctctgacagcaagttctgctctgatcgcttgcagcccgttgatatggttatacaatgacggggggcgaacattcatttttttagaaagtgcggcaagtgagacaccatttaccccttcctgatcggcaatctctgctgcagcgtctacaatcattttttgggtcaaacctattctcggtgacatgctcatcatcctttctttgctttttggatcgcctgtctcatccgctctgaaggtgatcgcaggaattttccatgtccgacagcgagacaggaaggcgccttatctgcgagcaattgtgcacttttgatggcctcctccttattccatgtggcgaaagcgggaaaaggaaacgtccattttatctggcctgatacagcgattcctccgtgcaactgaaacgcatctcctgctattaaagtgccgtttcttgtatcaagaaatgacatgctgcccggtgtatggcccggtgttggaatggcaagcagagaaccaattgtttcaccgcccgtcagcagttggtgaggctttgtttgtatgtgtttcggaatacctccttttataggcgtctgcggctcatcttgccgcaaggatgtgtcaccttggagcaagaatgaatcccgttccgagatcatgacctttgcatgcggaaatgtttgtgccaatgtatccagtgatccgacatggtccccatgtgcatgagtcagtaaaatatgctgaagcggttttccaagctgattcacagcttgaataatccctttatagctgcctggcagtgcggcatcaataagggtgacttcgttttcttcctctactaaatagcaattaaccggaaacaatgctggaaaaaaagtcagctgccaaaccgtttggtactgagtcattctcatctttttattcctcctaacaaaactaatggcgttagttttattattaactaacaccattagtttttcaagagtttattatttttttatcgctacataaatgttaacttgtgctcgctgtggcactgcggcactttgatcatacatctcaaaatcacctgtaaacgtgcgcagatgccgcttatcccaagtccaaatttccttccacgtttcaagcacaatctcttcaataggaccgattctggaagtgaaaacggcgtaagcggaagccggcaaatcaatgttttcatatggtcccggaagaatgtcgtcgtattcctgaaacgttccgactgaaaacgtataaaacccattcgtctcttgttcataattcgaatataaggcaataatgcttttgtctttttcagcctgtgataaaagagcgctcatatcctgcttccagaattggtcccacagtgccggaatcctcctttcttccgtcatttccagtgcgttgcttgtccgttgtgacagtccggcaaatcgtttccggtctaagtgtgttatatgtgaaaagcccatacgatctcctcctttttttaagattatagacaaagaaacctgacagcagtgtgtcaggtttcatatattttttgcatgtgatgaatggtttcttttactttatcccgtatatgaagaggctgcagaacctcaatatcctttccgaactggagcaaaaaaccgatcagccatggatcttctggaagtgaaatcactgcccggcagatttcatcttcctcacaacagtgaaggacatcatatccgaaccattcacctatgcgctgacgtgctgacggctgaacaagaataaccaattcagttaaacggtccttttggtaccaactcttatcccatggcaaagtgtccagctgaatgtcttttctgataaatgtctgatgtaagatagccagatctttcatccggttcagtttaaaaaagcgaaaatcatttcttaccaggcagtaggcatataaataccagtgccccgccttgcaaaccaatgtataaggttcagtttcccgaagtagtgtttccccgcttgcgcttgtatatgtaaaagatatcgttgacaaccgatcgatggcagcgctgattttctcgcgcagcgtcttttgatcctcagtatggccccaagccgtcatgtcaataaaccatttttctgtttggtgcttaaatgcttgagtagattgttcaggtataaggtgtttgattttttgataggctgtgctgtgagaaacgggttcatacatagatgaaacgctttgcaaagcagaagcaattgcaaacaattcctcctccttcagccactctctttcaagccgatacgtttccatgatgccaattccgcccccggaaccctgtgaggtcacaatcggaataccagccctattgatcgtctcaatatcacggtaaattgttctgacagatacttcaaacagctcagcaagctctgcagcctgcacttgttttttgctgatcaataacacaaccatcgctaacaaacgttccagtttcattctgcgcaccttttcttcttgtattttccaacaaaacaatcataacattttgataaagcttgggcatatctattatgcggcggaatacacctcgcatatgctatgaaaaaaggggtttccccttcttttttgtgttcagtatttatttcagctactatttccgaccggataagcatacacttctcaacggaggggatttcacatcatgcatcttacacttcagagcgtttatcctgccatgatcatcatcttttttctgtataaaaaaattaaaaggtccatcggataccagccgctgaagccccgctggctgttcacccgtatcattcttttctcgctgtttgcttttggactttcaatcttcagcgccattcacccttttttatatggatatctcattttgggcattcttggcggatggctccttgtctttttcgctaagaaaaacatctcttttgaaaaacgcagaggaaagatctattttcggactcatatttgggtagaaatgattctcctaaccttattcctgtcaagatttctatatcgagtgacagagctttatcttacctcgcctgatctaaacagccttggatcttacggtcagtcaatcggaacggaccctctgacaataggcgtcttttttctgatagccgtttattatatcggtttttcttcttttgtcatcaagctcagcagaaacgaactcgaacagcacggacacaataaagaaaaagacatccttgcccgctagcagcgagttaagcaaggatgtctttttcaatcatgctgcgtatgatggatcatttgctgaagaacatctaaaacatgttcatcctccggagagtaataaatcgatgttccttctctgcgcgatttgacaagccgaagatttttcaaaaatctaagctggtgggacacagtggattgcagtaaattcagcttttctgcaattccgtttactgcatgctcaccctgggacaataaatggagaattctgattcgggtaggatcagaaagcgctttgaatgtttgcgcgactagaaacagcgtctcctcgtccagatcagcagccgattgttccgtttctctaaattcagtcatatgtatcacctttctttattcatagttttatcttataacaaatgcgcttgagtgcaaaccagcctgcttgtattccatttcaatctcatagtttaaatttatgtttcaaatcaggtttttacttggtctgatataccgtcttatgtcataataaaaaaggtcatactgctccaaacattgagggtgaaacacagtgaagaaaaagagaaaaggctgtttcgctgctgcgggttttatgatgatttttgtctttgtcatcgcctcttttttattggtcctgctttttttcaaccgggatttaatcaaaaaacttccgatcgatacgaaaacgattgttttggaacgtttaaccgattacaaacccttggtggaagaagagcttgaaagccaaggactctctaattatacatcactcatattaggcatgatgtatcaggagtcaaaaggaaaaggcaatgatcccatgcagtcctctgaatctctggggttaaaacgcaatgagataacagaccctcaactcagtgttaaacaaggcatcaagcaatttaccctcatgtacaagaccggtaaggaaaaaggcgtggatttggataccattattcaaagctacaacatgggggcaggttacattgattttgtagctgaacatggaggaacgcatactgaggaattggcaaaacaatactccgagcagcaagtcaaaaaaaatcctgacctgtatacttgcgggggaaatgcgaaaaatttccgctatccgtattgctacggtgattatacgtatgcagaaaaagtaaaagaaaaaacaaaaactgttgaagaatctttgcaggttgcaacacttgaaaccatggaatccaaggctcatgaataagagtctatcaatttactgacaaaagcccaaaaatgaatttgggcttttgccatgtttacacgtaaaaaaagccatactgagtatggcttttaataatacggtgaaatcatcaaatatacaataacgcctgtaaggcttacatacagccatagaggcattgtccatctcgcaatttttttatggcgctccacctgcatgctgaagcctctgatcagcgtaaacagcgcaagcggcacaataattgcagaaaggcagatatgtgtaattaaaataaagaaataaatcgggcgcataataccttctccgccatagagcgtgttttccgcaatcgagtggtacgtcacatagcaaatcaaaaatagtaatgttgttgtgaacgcagccaaaataaagcgtttgtgagctttgatatttttctgtttaatcataatcagcgcggccaataagaagataaacgtaaagctattgaatatcgcattcagcattggcaaaatgtgaatattcgcatggctgaactgatctaatttaggcataaaaaacagcactgcgattaaaccgttaatcagaactgtcagcgtaaggacaatccccgtgtaatttttcggtttattttctgtttggttcatttggtgacctctcctaatttgtactggctatccaaatcgtatgcaaattcaaagaagatgtcaacggtttcgattgcttcgtcagaaattagacacacttcaaaggccggaggctattagccccggcctgttaggtttacgcctcttttatcaaatgttcaatgaccttatgttcattttcattcagcaggttcttttgaattttcgaatgaatgggtttattcatatgctgatccaagatatcggccgtttctttatccccggcaataaccattcgttcccatcttttcgcggcagctttttgatcaaggctggcagccagccgcttatacagtctcgattggttctctgttacatgttccctcatccggttctcttcaaatggtggcgctttgtctacagcggaatggctattcttccaagactcattgatcatatcatactcataacgctccaccgcctcaatttttcctaaaacggtttcaataattttcacttcatgctgctgagttaaaataaacgccgtacttgggtatgcctggcgcaaacccttcagctgatccaggacagctgtttcttcccagtaaaatcttgtatctacagggacttgaagcttaataggctcccatatgccgctgtcggaaacaaaaaacacgagactgcggggcatgtcttttcccattgcattcaagtattgattcattttagccctgattccatccagacacttttcctcctctggatcactagctgccaaatactcttttaatcggctgaatcctgactttagggcaatcttccattctcccccctgctgctctggatctctcatgtctgtattgagatacagagagagaattttatccggcggttccaattggacatactgtaatttgttaatcaatgaatcaatcgccattccgattcctcctttttcacaggttagttttctttttcctctcttaaaaacgatcaaacctgactttccgctaatttctagtaataatggaattgttgtttacaatacgcctctcttctaatacaattggtaactgtgtttctaagctgatttttgaaaggagtttgatcttgtttactattaaagaaaaaaatcgtcaagagcttgaagaagaattaaatgatttagaatttcaaatttatcgcatgcaggagaatatgaaggatttatctaaagatgccaaagtgcttggtattgatcaatcgaaacatgatgagtggatgattgtttcctcgattgatgatggccaaacatgcaaaattatgctaactgattgtaaaacggcttaccgaggaaaaggctgtttttcacttgtagcgtcttacaaggacgatgccattcatataggcgatataaaaggccctccgaatcacgggtttggttccatttgcatgaaatatttaaaagatatagcaagagaccacaatataccgaaagtcacaggagacatcgccaaacgggattggaatcatgtagaccggctgattcacttttatgaaaaacatcaattcaaagtatgtatcgatcatgatacccaatccggcagcattaagtgggttgatttgtaaaaaagtctggaagaaagagccaagatatgctgtaatggtaaaaaaccattgatggagggttctatgtacgcctcaaaactgaaaaagggagacgaaatccggatcgtgtctcccgcgaccagcatgtctatattatcaaatgaagcaaaaatccgagcacttaggttatcgggtaaccatcgctgaacacgcaaatgaatgtaatgaatttgattcatcctctatcgagtcaagagtccatgatctgcacgctgccttttttgatccaggcgtcaaagcgattttaacgacactcggagggtttaattcaaatcagctgctgcgttatcttgattacgagaaaatcaaacggcatccaaaaattctgtgcggctattccgatataaccgctctttgcaacgcaatttatcgaaaaacgggtcttgttacgtattcaggcccccacttctcaacatttgcaatgaaaaaagggcttgattatacacaagagtattttctttcttgctgcgcttcggacgacccgtttgaaattcttccttcaagtgagtggagcgatgaccgctggtttttggatcaagaaaacaggcgtttttatcctaataacggccctgttgtaatccaagaaggttatgcggaaggtactttaattggcggaaacttatgcacgcttaatttgctgcagggaacggagtattttcccgaaacagaacatactattttattgattgaagatgattatatgtcagacatccatatgtttgaccgcgatctgcaatcactcatccacctccccgctttttcacatgtaaaggcgattttgatcggcagatttcagaaagcatcaaacgtatcaatggatcttgtaaaagccatgatcgaaacaaaaaaagaattatccggcatcccgatcatcgcaaatataaatgccggacatacctcgccaattgccacgttccctataggaggaacatgcaggattgaagctatttcgggtacatcacgaatatggattgataaacattaatcagcttgtaaatttttttacaagcttttttagcgcaatcggttatgcatgccgcacgagacatgacaaatgtcatataggaggcatgatgtgtgctactacaaaagacttctctcattagcgtatactgaaccgagacacacaatgagaggatacttactatgactgaacaaaccattgcacataaacaaaaacagctgacaaagcaagtcgctgcatttgctcagcctgaaacaaaaaacagcctgattcagcttttaaacacgtttatcccattcttcggcctatggtttcttgcttatctcagcctcgatgtctcctatcttcttacgttagcattaacggtgattgccgcaggttttctgacaagaatttttatcatcttccatgactgctgccatcaatcttttttcaaacaaaaacgctataaccacattctcggttttctgacaggtgtcctgactttattcccgtatcttcaatggcagcacagccattcgattcatcatgcaactagcagcaatctggataaacgcggaacaggagacatctggatgttaacagtaaacgaatataaagctgcatccagacgaacaaagcttgcatacagactttatagaaacccgtttatcatgtttattctcggaccgatttatgtttttctgatcacgaaccgttttaacaaaaaaggcgcaagacgaaaagaacgtgtaaacacataccttacgaatctggcaattgtcgcgttggctgccgcttgctgtctgatctttggctggcaatcgtttttactggtgcaaggcccgatatttctgatttcaggttcaatcggtgtttggctgttttatgtgcagcatacctttgaagattcttattttgaagcggatgaaaactggagctacgttcaggctgctgttgaaggcagctcattttataaactcccgaaactgcttcaatggctaacaggcaatatcggttaccaccacgttcatcatttgagtccaaaggtgcctaactataagcttgaagttgctcatgaacatcacgaaccattaaaaaacgtaccgacaatcaccttaaaaacaagcctgcaatcactcgcgttccgtctatgggatgaagataacaaacagtttgtgtcatttcgggctataaaacatatacctgtaagccttccgcctgattcaccagaaaaacagaaactgcggaagaatgcctgatgataaaggaggtcttctaatatactagaaggcttcctttttattgttggagggtgcattctggctttcacaatgataaagttacaagtaagatgaaaagctgaaaatgaggtaagatcatgattaaaaatcattttacatttcaaaaactaaacgggattacgccctatatatggacgatatttttcatcctccccttctactttatatggaaatcatcatctacatttgttattattgtcggcatcattttgacgcttttatttttttcggtatatcgatttgcttttgtctcaaaaggctggaccatttatttgtggggatttttattaattggcatttcaaccgcctccattaccctgttcagttatatttattttgctttttttatcgcgtattttattggaaacattaaggaacgcgtcccttttcatattttatattatgtccatttaataagcgcagccgtcgcagccaatttcagtctcgtattaaaaaaggaattctttctgacacaaattccttttgtcgtcattaccctcatcagcgcaattttattgccctttagtataagaagccgcaaggagcgcgaacggcttgaagaaaagctcgaggatgcaaatgaacggattgcagaactggtaaaattagaagagcgtcagcgaattgcccgcgatctccatgatacgcttgggcaaaagctttctcttatcgggttaaaaagcgacttagcaagaaaattgatttacaaagatcccgaacaagcagctcgtgaactgaaaagtgttcagcaaacagcgcgaacttctttaaatgaagtaagaaaaatcgtttcctctatgaagggcatccggctcaaggatgaactgatcaacatcaaacaaattctcgaagcagctgacattatgtttatctatgaagaagagaaatggcctgaaaatatctcattgctgaatgaaaacattttgagcatgtgcttaaaggaagctgtcacaaatgtcgtcaaacacagccaggctaaaacttgccgagtagacattcagcagctctggaaggaagttgtgattacagtgtctgacgatggaacattcaaaggagaagaaaattccttttcaaaaggacatggcttactcgggatgagagaacggcttgagtttgcaaacggaagccttcacatcgataccgaaaacggaaccaagcttaccatggcaattcctaataattcaaaataaacataaaggatggcttatatgattagtatatttattgcagaagatcagcaaatgctgctgggcgctttaggatcacttttaaacctagaagacgatatggaagtcgtaggcaaaggtacaaccggccaagatgctgttgattttgtcaaaaaacgccagcctgatgtatgtattatggacattgaaatgcccggaaaaacagggcttgaagctgctgaggagctaaaagatacaggctgcaaaattatcatcttaaccaccttcgccagacccggttactttcagagagctattaaagctggcgttaaaggctatttgttaaaagacagtcctagtgaagagctggccaacgccatccgtagcgtcatgaatggaaaacgcatctatgcacctgagctgatggaggacttatacagcgaagctaaccctcttacagatagagaaaaagaagtgcttgaacttgtggctgacggtaaaaacacaaaagaaatcgctcaggaactcagcatcaaaagcgggacggtgcggaattatatctcaatgattctagaaaagcttgaagtgaaaaatcgaattgaagccattacccggtcaaaggaaaaaggctggtttaaataaaaaaggatcttggcatctgccaggatcctttttgttaacctgaaattccagtttgagaacctcgccgcaaccagaattaaattgatcgatatcctcgctcctatacccgctgaacgattgcttgattaacagcccaataaaagactggattgaatgatatccctgttaaaatggtcggccattgcacatcagcagaatttctgatattgattattttgtattttcagtatgacaaagttgtgccacttcgctcccgaagctgccatgcccaactgcaagagcttaatatcacaataaaaaaccgtctgaaatcaatccgattccgttccgtaaatggcatctgctacatccaactgcttattatctgccaaaaaagatacaacaccagctcgtttcgctgatcaaagatagtaacaaccagctataaatgtcatgatgccgaatgtctctgtaatgtggaaccaatcttttaacccgagagcccctgaatcgcacataaagagaaaaacgggaccactttcttttatcagcatatgatataaacagctctaagcagaacaaaaaaagacacaagccaaaagctcatgtcttttatcacaatctatattattagtttaagactttaacacttacagttttgacgccccaattagaagcatcacttttacttggtacaaatacgtcgattttatttcctttaatagcgccgccagtgtctgctgctgttgcttccccgtagccttcaacatagactttagaacctagcggaattacattaggatcaaccgcaataactttcgcattcgggttcttatttaagtcaatgcctgtagctgtaacgccggaaatgccgccgtcgttagcagtgtaagcagtagcagtaactgttagttcttttgaagcttcttgattatttgtatttgattgaacagccttctcctctgtgttaacagaagtttctgcctcagcctttgtttcttgtttaggttgctgttgtacagcttcttgtttaggttgctctttttgcacagcctcttgttttggtgcagcttgaggtgcgtttgtttgcgcattctcagtagctgtgtttgctgctgttgcctgaccttttactgaaagagttgatccagcatagatcatgtcagagcttaagttattccaaactttcaggttgttgactgtcgtgccgaatttttgagcaatcttagaaagcgtatctcccgctttaattgtatattgcccagtcgtggttgtttcttctgaagaaatggtcagtttttctcctgcaatgattttatcagaagttaacttgttccattcttttaagtcctttaggttcactccatttttctgagagattccccagagcgtatcacccttttgcaccgtaatttcttttgcagaagcgtgagctccgaatgcagttgttgaaagtgcagcaactgccacaaaggacataatcgtcttcttcataagtaaatcctcccttgttagctttttattggcggctaacaggtgatatcgtaacacacgtaaatgtcaaatcaataacaaaaagatatgatttagattacagttcctttacatgaaggatttctctctgatggaaagacttgctgaacccttgatataataggcttcgcaggtctttttattttgaggcgaaacagagaaaataaaatgtgttttttatagaaaaaaagattgtttttctgtttttttagtctgtcatccttgcataagcttgtatttcttgtaaaaaaagccggccgtattttgctcttttttgttctccgactccttttatagacaaaagttcatcatcatttacgggctgttttcctgacatttcttttaacgtttggtcagagaaaacaacaaatggcggaacaccctgctcagccgcaatttctttccgaaccatgcgcaatcgttcaaacagctcgtcattttcagtaatcgaggccgcttttagcgcttcttttctcgttactgataattctcctctcagcacattccttcctttactgctgacaaaaagagtcggaaacgttccgtctgacatcctgatgaaatcgtcagaaataagaaattcgataaaatcactgatttcccctacggattgatgttttaatatcccatatgttgagagatcggcaaagccgttttcaagaacttttttatttttagatccggcgagcacttgggcaaccatcatcttaccaaagcgttccttcatgcgaatcatacacgataagaccatttgcgcctcccgtgtcacgtcatgagccatccttgtatcagtgcagtttccgcactgtccgcacgcatcaggctccttttctccgaagtacataaggataaaacgctgcagacagtcttccgtgtgacaatagtcgaccatttgcctcagcttttttaaatcctgcttttgtttctcttcatgttctgattgttcaattaaaaaacgctgcactataatatcctgcggtgaaaacaggagaacgcactcgctgtcaagaccgtcccgtccagcccgtccggcctcttgatagtagctttccatatctttcggaatttgtgcatgcagaacaaatctgatatttgatttatcaatgcccattccgaaagcagaggttgccaccatcacttgcagctcatcattaagaaacctttcctgctgctcttttctcacatcatcagccaagcctccgtgataccgccctgcattgacccgatttctttttaatcgctcataaatccggtcagcttcttttctggtcgctgtatagataatgccagcttcatgtttgttgttttgaacatactcgtcaataaaacgatccttattttctccctttgctactttaaaggttaaattgtctcgggaaaatccggtatatacggtgttttctttttgtatgtgcagctgtttgcagatatcctcgtgtacctcaggggttgctgttgctgttaatgccatgatgacaggattgtcatgtaattcacggaataaaatttcaatatttctgtagcttggcctgaaatcatggccccattgagaaatacagtgcgcctcgtctattgcaaccaaagggacatcaatgccctgcaaaatccgaataaactccggtgacgttaatcgctccggtgtaatgtaaaatagcttataggccccttctttaagcccagtcagcctttcatatatttcctgactcgattgtgtgctgttaatgtacgcggccttaatccccgcttcttctaacgcatcgacttgatccttcatcaaggaaatcaacggcgaaataacgatcgtagtcccttcaaacatgagtgccggaatttgatagcaaattgatttgcctcctcccgtcggcataatgcagacggtatttcgtctttcttccgtcaccgagcggatcgcttcttcttggccattgcggagcttttcataaccgaaataatgggccagaagggattgggctctatgtaacataacgtataaacctcgcttttccttgaatttcttccatcatatcataaaaaaacggtcttcatttcttccacacagaaattgaatttttgctataccaaacctttttaaataaaataaaaagccatttcccaaaaggaaatggctttcgctacgtcttgccgtatgcaagtaagaaagttttaaaccaccactcctcaaagtgggtgtttgcagaaacgttcctgtcgtcctctgcaatggaggcatgacattccggcttcgatataaaactccctattacagcttaaaggttaaaacttaattaacaatacgcacaaagtagcttcttttatatagtacaccatcagcagctttttatcaagagaccagaacaattgtttagaaaaactttttccagccgataaaaacgatttttcgctattatatccggagattcgacaagtcaaaaatatattacaataaaaaaacagccttttttcgcaaagaggattcatcactttcttctattataatatgtatacaaaaaaactcctatcgcccaatgataggagtctttgtttcattagaattttgcagcaagatcttttgcttcttgtaaacctttttcaatgatttcttgcgcttgatcaggtgctgcgttatgtccttcgatgacaactgtgtgcaagtcttgaacaccccagaaaccaagaactgttttcatgaagtttaatgacatttcaagtgcagccattggtccttctgagtagacaccgccgcgagcgttaagaagcgcaacttttttgcctcccattaaaccgactggtccttcttgtgtgtatttgaatgtaacgcctgcgcgagacagataatcaacataagtatgaagcactgctggcactgtgaagttccaaagcgggaatgcgaaaacaactttgtcagcttttacaaactggttcagatatttgtcagcaattgctgcttgttttttctcatcttctgtcatttccattccttgacctgctttaaatgttccgttaatcatatctctgccaaggtaaggaaggttttccttatgaagatctaattcaaccacttcatcattagggttgttttctttataagcagctaagaaagcttcgtaaagtttagttgaaacgccttcttcagctgtacggtcgcttgattttacaaataaaactgtagacatttgtattcctcccggtaaactttttatatttacttacaaatagtatgttactttcttttttacgtaaagtcaatcactttattttgaatatgagattttttttcaaaaaaaagcaagtacatctaatatcggtgtacttgcttgccatttttacttcgaatcttgttcacgatccaagatttcatacgtctgcgagcttttttgatcaattgtttctttgttggataagtcttttacctgttcatgaaactctctttcataagaaggagcatctgtctccagatcatcctccacattagcttgagcctcaactgtcattcttgcatagggaacagcttcaagtctttcgtaaggaatgtcttggccggttttttcacacacaccgtaagttccgtctttcatcttttgtaatgcacggttgacctcctctaacagctcccggtcaatctctttcactgtttggtctgtcatccggtctgtgacgagcgtcccgtggtctgccatatggttgtcaaccccgttggaaagctcccccacttcttccgtcattgattctgtttcctttttctcgccagacaattctttttgcatatcgagcaatttatgatagagatgctgtgtttgttcttttgtcagtgccatgtatatcctctcctttctatcctgtttcccgttttgccttctgtcaaacatggaaacatcgatggaaagaagctactgcctttttgaacggatcgtgaccgctggcgtcgatggtgcttcgggttttcgttggcactttttgtccttctcttctggcggtatataataggttgcgcctatatttaatctgccgctcagttcatcaatggtcagctcgccgaattcaagatgatagtcaattttttcgacattcagcgtttcaatatgtatataggtttcttcagactcctgtttgctgctttgtttttgtttctcaatcactgagagtctttcttcacattcacgcagtttgtcaagttctggtttcaagcaaagcctgatcagcgaccggaacatttttttcatgacatcacgaccctttgcatactcctctttcgtctacatatataatgaggtatataccatagaaaggagaggttttcatgcttccgactaacatcaatatttctcatctcaagactaactcgataggcaccggctcatcccttacctttggttctgcggagttaaggaacaggtgctctgctatcaaaagaaataacggttttggggaacaaaatgcagatgttattgttatggtcattccgattgaatcaattgatgaccgtgatggagcagatgcactcagtatgaaaatcaatcatcaataacaatggttttcgcttgaccttcgtctttttgaatagtgatgtataggattccgtctttaaaaatggcattcatctttccatgaagatgatcggaaagctgaattttcttctcaaaacttccgtatttcccttctttttggcgaaagtcctgttcattaaaataggaaaagcgctgccccttcaccactaaataatctccgtacgataatatgtgaacgtcttgtttacggtagcctggaagataaattaaaaactgcacttccgcaacggtatctacaatatccatgctcggaaatgaagcatctcctttccctcgctgatcttgctgcgcaaacggaaacggagattggccatttgtcataaaaggggttttttggtcttcatcaaatacctgtttccaaaagtcaccgccgtacatctgctgtgcgaattccatccactgcttcatcttttcgaaatccatttgaagccccctgtcttaacatactttataaccgccagcatacaactatagaaaggaggtttgcctgtggttcaaccaactccgtatatcaatattaatattttcatgctgaaaattaattcctttgaaaatgcttcagcggttaacgtaggacaaaatttattggcagaatggcaaaattcagataaaaaaaatcaaggctacggacagaattttggagatgcgagcggatttatgggcacgagaagccatgtggatgacagagaccaaattgattctccggcctcttttgaaagtgaagcggttaactcctcaatcaaaaggaagtgatgagatgttcttttcaccctccgtcgtgaatgtcggcggatttaaaatcaatacgatggatcgaggttcctctttaacactcggtccgtatcagcaggtcgattactttttatcagctaaaataaatcaagggtttggagaagaaaatggcgactttactcctcttgtcgtaccgatttcaaatgtattagatgcagatcttgttgattcgaactcagcgaaaaacagtgtggtgtaataagaacagggcgcacatgccctgttttttttataaaaaaaagcctaaccattttttgaacggctggctcatcaaatattcagctgcacaaatgctttgtcagcaccgcctgaacctcgcttaaatcggtgtctttcgcaaattctaattcgaacgttttgcttcttgtcatcaataaaagcccagtgtccggatcaaacattcccgcttcttgaatggcaaagctttcaattgttttatatggaagaaatacacgaaccttctttttggaaaacattttattgtcaaagaaaatgatccgcttatttgtaaagcaaatttggtccactcggagcttataaatcgattctattctttccccttcaacgagcaaagcctcaagcttctttgcgtccgttgatctgctaacagaaaaaatacccaatgaagaacccctctttctgcatttatctatttgttttatcattcactacataaaaataagtcctttatccctatataagaatacgacatagaagacatttaaaccattacgaacagattacatttttcaaatttttgatttgttttttggcttttaagctgttgtcatcaagtaatacgcacatatagagaaaaaagtttcaatattcagcaatgtttttataaaaaagcggtttttaatgatttttttaattttgttttatatttcctgttttaaccacaaaaaaaccgcagctgagctgcggttttatgtatcgactgcttttaacaaaatctgtttgatgcttcaaggaagcattacatctcttcgaagtattctttataatagccgccgactttattcgtattgtcgaccacaaagagaaactcctctgtttcattttttacttcatattcttttcccggcgttaaaacgcggtttacgatatatttttttgcgtttgtctgcacacactttacttttttaattgtttctttttcaagccaatttttatgaatcatgatgaaatctccttttcttatctataagcttattgtagcttttttcttttgtaaattgcaatatcggttattcattgattttgccttgatttctattatagaatgtttgtatacgcttacgtttgaagcaactatcacagcttatttctgctattcaatccaggaatcaatgtgctatcaccaagaatctcagaacagaccataaaaaatgactggaggtttgttacggatgagttctttaacgatgcaagtgacgaaaaggctggagacatttttacagggaacaaagaagctttatattgacggaaagtttgttccgagtgcctcaggggcaacctttgacactccaaacccggcgaccggcgaaaccttgatgacgctgtatgaagcccaggctgcggatgtggacaaagcggttaaagctgcccggaaagcctttgaccaaggtgaatggagaacaatgtctccagcttcgagaagcagactgatgtataagctggcagacttaatggaagagcataaaactgagcttgctcagcttgaaacacttgataatgggaaaccgatcaatgagacgactaatggagatattccgctggctattgagcatatgcgctattacgccggctggtgtacaaaaataacaggacagacgattccggtttccggcgcttattttaattatacgcgtcatgagcctgtcggtgtcgtcggccagatcattccatggaatttcccgctcctgatggcgatgtggaaaatgggcgcggcacttgcaacaggctgtacaatcgtcctcaaaccggctgaacaaacaccgctttcagctctttatttggcagaattaattgaccaagccggtttccctgccggtgtaatcaacatcatcccaggattcggtgaagatgcgggagaagcgctgacgaaccacgaagcggttgataaaattgcctttaccggttccactgaaatcggaaagaaaatcatgtccaccgcagcgaaaagcattaagcgtgtgacattggagctgggcggaaaatcgcctaatattcttctgccggatgcgaatttgaaaaaagccatcccgggcgctttaaacggtgtgatgtttaaccagggtcaagtctgctgtgcgggctcacgtgtcttcattcataaagaccaatatgatgaagtggttgatgaaatggcgtcctatgctgagtcactccgccaaggagcgggacttcataaagatactcaaatcgggcctctcgtaagcaaggaacagcatgagcgcgttctttcctatattcaaaaaggaaaagatgaaggagcaaaagcagtgaccggcggaagctgtccttttgaagcaggatattttgtcgcaccgactgtgtttgcgaatgttgaagacgaaatgaccatcgcaaaagaagaaattttcggacccgtgctgactgcaattccgtacgaaacagtcgatgaagttattgaacgggcaaaccattcagaatatgggcttgcagccggactatggacagagaacgtcaagcaggctcactatatcgcggaccgacttcaagccggaaccgtttgggtcaactgctataatgtgtttgacgcggcgtctccatttggcggttataaacagtcaggactcggacgagaaatgggatcatatgccttggataattacacagaagtcaaaagtgtatggataaaccttgaagactaacatgtatatttaaaaaactgctgcctgccagcagtttttttctttctgtaatggcggtaaaagacgctgaatatatatgcttctgaaggagttgagcgtgatgggcacacttcaggagaaagtgaggcgttttcaaaagaaaaccattacggagttaagagacaggcaaaatgctgatggttcatggacattttgctttgaaggaccaatcatgacaaattccttttttattttgctccttacctcactagatgaaggcgaaaacgaaaaagaactgatatcagcccttgcagccggcattcatgcaaaacagcagcccgacggcacatttatcaactatcccgatgaaacgcgcggaaatctaacggctaccgtccaaggatatgtcgggatgctggcttcaggatgttttcacagatctgagccgcacatgaagaaagctgaacaatttatcatctcacatggcggtttgagacatgttcattttatgacaaaatggatgcttgccgcgaacgggctttatccttggcctgctttgtatttaccattatcactcatggcgctccccccaacattgccgattcatttctatcagttcagctcatatgcccgtattcattttgctcctatggctgtaacactcaatcagcgatttgtccttattaaccgcaatatttcatctcttcaccatctcgatccgcacatgacaaaaaatcctttcacttggcttcggtctgatgctttcgaagaaagagatctcacgtctattttgtcacattggaaacgcgtttttcatgcaccatttgcttttcagcagctgggcctacagacagctaaaacgtatatgctggaccggattgaaaaagacggaacattatacagctatgcgagcgcaaccatatatatggtttacagccttctgtcacttggtgtgtcacgctattctcctgttatcaggagggcgattaccggcattaaatcactggtgactaaatgcaacgggattccttatctggaaaactctacttcaactgtttgggatacagctctaatcagctatgcccttcaaaaaaatggtgtgaccgaaatggatggctctgttacaaaagcagccgactttttgctagaacgccagcataccaaaatagcagattggtctgtcaaaaatccaaattcagttcctggcggctgggggttttcaaacattaatacaaataaccctgactgtgacgacactgcagccgttttaaaggcgattccccgcaatcattctcctgcagcatgggagcgaggggtatcttggcttttatcgatgcaaaacaatgacggcggattttctgctttcgaaaaaaatgtgaaccatccactgatccgccttctgccgcttgaatccgccgaggacgctgcagttgacccttcaaccgccgacctcaccggacgtgtactgcactttttaggcgagaaagttggcttcacagaaaaacatcaacatattcgacgcgcagtgaagtggcttttcgaacatcaggaacaaaatgggtcttggtacggcagatggggtgtttgctacatttacggcacttgggctgctcttactggtatgcatgcatgcggggttgaccgaaagcatcccggtatacaaaaggctctgcgttggctcaaatccatacaaaatgatgacggaagctggggagaatcctgcaaaagcgccgaaatcaaaacatatgtaccgcttcatagaggaaccattgtacaaacggcctgggctttagacgctttgctcacatatgaaaattccgaacacccgtcagttgtgaaaggcttgcaataccttaccgacagcagttcgcatagcgccgatagcctcgcgtatccagcagggatcggattgccgaagcaattttatattcgctatcacagttatccatatgtattctctttgctggctgtcggaaagtatttagattctattgaaaaggagacagcaaatgaaacgtgaatcttatcaaacggaaatgttcaattggtgtgaagccctaaaagatcagattcaaaagcgaggtcagcttgaccagtttgaagatcaaatcgacaagatgattgaggctctggaagatgaccaaacaacagaagaagattggtataaacaggccgctgccctttatcgggatattacagaatcagatgatacaagtgaaagacgcgcttatgtccctatagggaaacacgtgctgccaaagcttccttacaaatactccgccttagaaccttatatttcacgcgatattatggtccttcatcatacaaaacatcatcaaagctatgtcgatggcctgaacaaagcagaatcagagcttaaaaaagcgagagcaacaaagaattatgacttaatcactcattgggaaagagagcttgcgttccatggagcaggccattatttgcacagtattttttggttttctatgcatccaaacggaaagcggcgtcctacaggagcattgttccaaatgatagacctttcatttggaagctattccgcttttaaagaacattttacccaagccgctaaaaaagtggaaggcgtcggctgggccattctggtctgggcacctcgatcaggacggctggagattttaacggcagaaaaacaccagctcttcagccaatgggatgtaattccccttttaccgcttgacgtatgggagcatgcctactatttgcaatataaaaatgaccgggccagctatgtagaccactggtggaatgtcgtggattggcgcgaggcagaaaaacgttttgagcaggcaaaagaagtcgtttggaagctctattaaaaaaagccccctttccccgggggcttcgtgttttaaaaaatccctaccacatgcaaaaacacgatgatgatggcaacaggagatagatatcgaatgagcagcagccaaaccgcaaaccactttcgtttgagattggaaccgcttttcagctcgtcaaacaaatcctgtttcggtatttttagcggtacaaaaatcgaaatcagtaacgcacctaacggcattaaaatattgctcacaagatagtcggccgcatcaaaaatagacagatgaaatatagagacgtcacttaagacaccgtatgacaatgcagacggcacaccgacaataaaaatagcaattccgcctaaccaagcgaatcgttttctcttattgacatcgcctttcgaaagtactgcgaccaaaatttccagcattgaaaaagcagatgtcaatgcagcaaataaaaatagaagtaaaaatgctaataaaaagataattccgaacggcatttgattaaacacagtcggcagcacgttaaataacagaaccgggccttggtctggtttgaggccgaatgaaaagacagctggaaaaatcgcaattccggccattacagcaacaagcatgttcataacagttacagatacagcggactgtaccagattttcctgtttctctaaataagcgctatacgttaccatgacagatacaccgacacttaataagaaaaaggattgtcccattgcatataaaatggtattggcatcaattgcagttaaatcaggcatcaggaaaaatttgattccttccatcgcgccatcaagtgtaaccgagcgcaccattaaaatgatgaataatagaaaaagcgccggcattaatacttggcttgctttttcaattccgctgcttaccccttttgcaacaactaaaattgttaccaccataaagagcagctggcctcctacagccaaataaggatttgaaatggtacttgcaaatatcgtatcaaaaccagatgtctgcgataaaccgccagtgaagccttttataatataaattaaaatccatccgccgacgacactgtagaaagatagaagaataaagcatgtcaccatgcctaaataaccgatccaatgccacttcgttcctggagcaagtgttttataggactgaacggcatctttctgtgttcttctgcctatgatgaattcacctaacaataaaggcagtccgattaaaaccgtaaataaaataaaaataagtaaaaatgcgcctcctccgctggttccggcgacatatgggaatttccatatcgcaccaagcccgatagctgatcctgccgcggctaaaataaagccgagcttcgaagaccattgatttgcttccttcaccgtatcactcctatttgatctaaccattataaaagttcattgtaagaatatcttcctatatagtcaagaacattttgattagtttacatcttatatctatatacatctgccaaaaactaatattgaattattcagaaaattatttataataagagaatgttatgaaatttgtaagaatttctgctgaagttcttgataagtgtgttaggagtgtttttatggacatcattagaaaaataagtcatttcgcaggacaaacctttggcatatgggtcattgtttttgcagtgctgggattttctttcccatctttatttacgtggatcagttcttatattacgatttttcttggcattatcatgtttgggatgggccttacactgcaagccgatgatttcaaagagctggtcagaaagccttggcaagttattattggagtaatagctcagtatacgatcatgccgctcgttgctttcggcctcgcatttgggcttcatcttccagctgaaatcgcagttggtgttattcttgtcggctgctgtcccgggggaactgcatctaatgttatgacattcttagcaaaaggaaatactgccctttctgttgcggttacgacaatttctaccttattggcacctgttgtaacaccgttgttgattatgctgtttgccaaagaatggcttcctgtctcgccggggtctttgtttatctcaattttacaggcggttttatttccgatcattgcaggtctgattgtcaaaatgtttttcagaaaacaagtggcaaaagccgtacatgcccttccgcttgtttctgtcattggcatcgttgcgattgtctcagctgtcgtcagcggcaatcgggaaaatctgcttcaatcggggttgctcattttttcagttgttatcctgcataacggtatcggttatttacttgggtttttttgtgcaaagcttttaaaaatggattacccgtctcaaaaagcgattgcaatcgaagtcggcatgcaaaactccgggcttggggctgcacttgccacggctcatttctcaccgctatcggccgtaccaagcgcaatattcagtgtgtggcataacctttcaggttctatgcttgcaacatattggtcaaaaaaagtgaaaaagaaacaagctggatccaaaagcagcaatctatcactttaaatatgcatcaaaaaaggtacatcactttatcgtgatgtacccttttttattatccttctaataaaagctgttcaggatcttccagtaaatttttgattgtcacgaggaagccaaccgcttctttaccgtctacaatccggtgatcataagataaagcgagatacatcatcggacggttttcgaaacgctcttcatcaattgctactgggcgcagctgaatcttatgcatgcccagtataccgacttgagggctgtttaagatcggagttgacatcagtgaaccgaaagtccctccattggtaatcgtgaaggaacctccctgaagctcgctaagggttaatttattgtttcttgcttttttcgcaagctcgccgatctctttttcgattcctgcaaatgtcaggcggtccgcatctcgtactaccggtacgacaaggccttcatcagcagcaacagcgataccgatatcatagaatttcttaacgatcaactcatcgccctgaatttccgcattcaacagcggatattttttcaatgcagccacgaccgctttcgtgaagaaagacataaagccgagcttcacttcgttttgctcaaagaattgatctttgcggcgttttctgagattcataacagccgtcatgtccacttcattaaatgtagtcagcatcgccgatgtttgctgcacctctacaaggcgttttgcaatcgtttgtctgcggcgtgacattttttgcacttcgacaggtttatcaaagctttgctgtgcttttggagcctgaggctgctgcttttgctgaggagccggttttgatgccggtttttcgtacgcttcgacatcctgcttgcgcactcttccaagcggatctccagttggaacttgagacaggtcaattcctttttctctcgccagcttacgggccgacggagaagcgatcgttcttgattttgcttcagattgtgcttcctcgctcacctcttgtgcagctggttcagcctgtttctcttctttcacgctttccttgctttctgctttctctgtaggagcaggggcagaactttcacccgcgccttctgaaatcgtaccgataatttctccgacctggacggtatcacccgaatctttcaatacctcttgaagtacacccgattcttctgctgtcaattcaacattcactttatccgtttctagttcaagcagatattcaccctgttctacatagtcaccaggctgctttaaccattgggctattgttccttctgagattgattctgctaattcaggtaccttaatttccgccattttttcatttcccccttagtttttgcgagtcaagctatcagatacaatacgttcctgttcttttttatgaactgtcggatctccctctgcagggctggatcgtcttcttcgtccaatatattgaacgcttactccctctggtgcaatctctgtcaaatacgggctgatataaccccaagcccccatgttctgcggctcttcctgcacccaaacgatttctttcaggttcggaagttttgcaaataactctttgactccttttgccgggaatggatacaactgttcaattctcgcaatgtgaagccactctttaccgtcttctaacttattaaaatgatcactgatgtctatagacactttaccgctggataatacaagtctggttactttttcatagtcatgagaaagtcccgactgttcataaacaggctggaagcggctttcgctgagctcctgcacttccgacaccgtatttgggttgcgaagaaggctcttcggcgtcataatgacgagcggtctgatttcttcacgaagcagcattttagcctgtcttcttaaaatatggaaatactgtgccgcgcttgtcaggttggcaaccgtccagttgttttctgctgcaagctgcaggaatcgctcgattcttccgcttgagtgctcaggcccctgtccctcgtagccgtgcggaagcagcatgactaatccggatttttggccccatttcgcgcgtccggcagaaataaattggtcaaaatacacttgagcagcgttggcaaaatctccgtactgcgcttcccacaaaacaagcgtttccggtgaatgcacgttatagccgtattcaaaaccgagaaccgatccttcagacagagggctgttatgaacagcaaatgatgtgctgcagtcagataagtgatgaagcggcacaaattcttcgcccgtctcactgtcatgaagcacaaggtttctttgggcgaacgttccgcgctcggaatcctgtcctgttaaacgaatcggtgttccgtctttcaaaattgaagcaaacgcgagtgattctgccaaagaccattccacttttctgtcatcatcgaacgccttggcgcgtctttctaaaatgcgctttagcttgccgaaaacattaaatgactccggccagttgatcaattcgccattcagcttgcggagcacatcaaaatcaatcgaagtgtccacatctgggaaaccgtttgatacaggctctggaagttcaatttcacaggcagtgtgttcctttttagacggaactttctgatatgcatcttcaatgcgcttcgttaccgatttttcgatgttttgaacgacttcctcggtaagtacgccttcttttaccagcttttcagcgaaaatttgtttgacggtcggatgctttctgacagcatcatacaacattggctgagtggttgacggttcatccatttcgttgtgtccatagcgtctgtacccgatcaaatcaatcagaaaatccttgttgaatgtttttcggtattcgaccgcaaacttaacagctgaaagacaagcttcaggatcgtccgcattcacgtgaacaatcggaatttcataacccttggccaggtcgctggcatattttgtcgatctggattcagcgctttctgttgtaaatccgatcatgttattggcgataatatgaatcgcaccgcctacttgatacccttttaaagaacttaaattcaatgtttcagctacaattccttccccagggaatgcagcgtctccatggattaaaatggccagcgattttgtttcatcttgtaccgggtatccgctttgtgttcgcgtttcctgtgccgctcttgtgctgccttcaacaatcggattgataaattccaagtggctcgggttgttcgctaacgtaatgcgcgctgattttgtttcagcgtcttgaagctcccgattcgcccccaaatggtatttgacatcccctgtccatccgtagctgattccaattgatccctcagacgggacaagatctttattcggcgcatgctggaattcagagaagatgatttcatacggtttgccgagcacatgtgccaagacattcaggcgtcccctgtgcgccatcccgatgttgacacttgtcgtgcctgatttgacagattgtgcaataatgtcatcaagcactggaacaagagcgtccagaccctcaatggaaaagcgcttctgcccgacgaatgtgcggtgcaaaaactgctcgaagccctctacttcagtcagtctttccagcacagccgacagcttttcagctgagttcttctggaacagctcgccagattcaatctttcttgtcagccactcgcgctctttgaagtcatgcacatggtcaaattcaaaagagatggttcttttatacgtatttcgtaaatactgaatggcttctaaaccgttcgtaatgtttttaggagcgtctttgcagatgacagacgcaggtattgcttttatttcctcttctgttagcccgtaatcggataatggaaaaagttcgctctttttctcatcctttctgagcggattgacggaagcgttcaaatggccataggttcgaatatcttctgcaagtctgactgcggatgcgatcttttgaatcagatcggctgtaacacgtcccttttcttttgttcccgaggcctcttttatatcgcttggcggagcaccgagctcgtcgaacatttccttcaaatccgggtcaatgctgttcggatcctgggtatactgatcgtaaagctccagcgcatagccgaggttcggaccgtaaaaatcttcccaattcattcgttgtttcatactattttgaaacatttgaatattacccccaacttaaataatcaagtgatcgattcactatcttgaaataactttcgaacgctgtgtccaaaattatgtaataaaaacgcttccaacgatattttaccactgtttgcaatttgattctaccttgattgttcacaaaatagtaaaaaacctttataaaaaacaaaaaatttaatcattcgaaaaaacaaacgccaaaaagcataggattaagggctatcctatgcttttatgaagcagttttttcagcagcggatacaaaacatccggtagctgatcaacatccgggacaaatatactgaattttccgtacatatcctgaatcgtcttcatttgcgattcttctatttctgagttggagagaaaaacatttatcacttctattcctctttttcgggcttcgataaccgcctcacttgtatcgacgatcccattttgttcgtagccaaatgcggccggctctccatctgagaaaacaattaagaacttttgcgcctcgctgcgatgcagcatttttttcgtcatctgcctaattgcgtacccgtcacggttatcttcttctggctcaagctgcataatggccggtccagaatcttgtcttaatgatgattggaagggaataaccgtattgaaatagtttggttggcttgtttcggttgcatcatttgtgtcctcccagaaaccgacaatctgatgcggaaccgctaccgatttcaacgcttcgtgaaacagcacgattcctcgttttgtttcgtccattttgtcgaacatgctggcggaacaatcgaccagcaatgtaaaaactgcgtcgatttctgtagacggttcttgctttttgtagaacaggcgcggatttcgctcagtgaagtaacgaagaagcttattattcagtctcccggcatgaagatctgttctcggcaatgtttttttatgctccagcgttttttgaatcatttgtttcaaacgcttttgatacgattcaatcgtttttgcctgctgtttataagaaagctcctcttcactagttgccggctgcggttctttataaattggaaatgcatatttattttctttgccgtcagccatacccgctccgttcggctggtctttttgagactccagcgcttccagcttggaatagtctttccgtttcgtatgtctggctgatccttgaacagagccaagggcctgatctccatcgtcgccttcccttgaagcatcttttcctaaatctgattttgcgccgtgttcaatatcaaattgaaggaagcttttagacggtgcttctgtttcccggtgccatgtcggcatttcttcttcatggatatcctcatcaccgtctgatttttttggaagcgtgatgtcatcactcagcttcggcgcttttttctcttcttcaaataacggctgttctgcagcttttgcgtagtcaagctcaggcaaaaagaagtaggtgttcaacatgtctttatcgagcacctcttcaagtccgtccatgaggtcctcaacaattttcagaacctgccgtgtcgaatctacttcatacacacgcaagagctgctgctcaataaacgggcgcatcagatcgatatcttcacgcatggatggaagggtctcgagcggcgattccgctgtgagcttgacatagatcgcgcaaaagagcgcatcggtaaaaatgcttcgttccaaatttaaggtcagctgggttgagaaatgttttctgtacatgtcttttcgcttcgcaaatacatgtttcgtacccggacgctcacgtttgatgcattcttcgatcctaatgtcttcaagcagcataaagagctgcttggcaaaacttttaaaggtgagatgacgatggatatcattcaaaaagttcgcaaactcatgcagcgagctatatcttgttccgactgaacgcaggtagacgtcgcttttcagacccgcttccatgtcctcagctgccctgtctttccaaaagtggctcatatagattttcttttcaaatggattgtaataggactgaacgccatactccacttctaccgcttcactcttggtgagtgttttggccaaatcagtcagcatcataaataaaaatgaatcaatcgtgctgtcgttaaatttgataaatttcatcgcagccccctcattcaaacagagtttctgcaatatttcggacggccgctttttcccgatcatcatcaagcttttctacaattccccgctcaatggcacgacgcggcggaatataagcagctaaatcacatgtatcgattaaagctctgatggatgccgcttcttcagacacctgtccgttattggcctgaacgatcaagtcagaggaaagcgtgataaatctgtcaatcaatttctcgtctttcaaggctgactgagacatgagcacttgtttcagcagctcgcctttaatataaggcacatcaatgatgacaaaacggtttttcaacgcttcattcagaggaacagttccgacatagccttcattgatggctgcaatgactccgaaaccgcttttagcccgtatgacctcgcctgtaaacggatttgtcatcatttttctgtaatctaatacaccgtttaaaataggcagtgtttccggcttcgccatattgatttcatctatataaagaaaatggccttccttcattgcctttgtaacaggtcctgaaacaaactcgattgtcgcctggccagattgattttcaatcgttttataaccgaccaatgcctcagcatccaagtcgactgaacagttgacgctgtgcatcggtttatgaaaatagctggacaatgtttctgccaactttgtttttcctgaacctgtaggccctttcagcaggacattttttcccatggctaatgcaataatggcgtcaaatagaatggcttcatcctccgcctcatagcctgatgttcctataagcgattgaaactccggggaaataggctgctctttatatgataaaagcttttgttgtatatcttccggcaatgttaagtgctgtagttgtgttgtcatagacagattccctttcctattcatattccttaacgagtatactaaaaaagcccctgtatgctcaatacaaaagggcttggatgatattactgcttctcgttatttcccaaaagggctccgcagacaatacgcgcaccggaattgccgcttgggtttgtcagataatcgtccgcttgttcatgaataataaatgcacttccgtcctcgtcgagaatatttagtttacttccttttttcagtgaagtgtcaggcgcattcattatgacatctacctttccatcagcaccgacttcaaggttcggcagatctccggcatgatgccccatcggattattgaagccgtgttctttgttcagtggattaaagggaccgcccgctgattcaaaatccggcctgacacaagaacctttctcataaatatgaaaaccgagagaagcacctggacgcaggctgtttgcggaaatatgaatatcgaggccttcatcatctgattctttgatctctataaagccgactgctttcccttcacgattgaccaactggacatgatgaccaaacgctgacgtttcaaccacttttttttccggcacccggttaggagggtctggaggttttttttgtccgcatccggcaactcccagtgccgtcagcatcatcaacagcaagagacggtacatactgtctcccccttgttttttctaacagtgtggtcaatcattgtctggtataaacaaaaaagcctataaaaggctttttgtcatactcatttttaaaaataacttcttgcgcccaagtaccgctgtttccaatacgaattgctgagattggaaatgtcgacgcccgatgagcttgcatgaataaaatcaccgccgcctagataaatccccatgtgagacgggccggatttatatgtggtaaagaagacaaagtctcctactgacggctggctgactttctgcatgacattccaataccctgccgtactcaatcttgatatagatgatacattattaatgaggtaataaatgaagccgctgcaatcaaaaccggcaggcgtgtttccgccccatcggtaaggcactccgacatattttttcgcttccgttatcattctgtcaatcttcgagcctatttgaatgtttgaccctgagttatcttttggctttgttggctttgtcggatttgaaggattagattttgatgctcccgaaatagtcagaacctgcccgatttgcaacacatccgatgataaattgtttttatcacggatgctttggacagtgactccgagccgatttgcaattttccacagcgaatcgcctgcttttaccttgtacgtcgttgtttttgagggattggagtttgacggcttttttgaaccgctgtttccgctcttcggtgagctgcttccttttattttgagcacctgtttagggtaaagtgtatctgatgttaagccatttaaggtttttaattcagctacagtcatatttaagctgtttgcgattttccacagtgagtcaccaagcttgaccgtatatgtactttttgaagaacctgaagaattggaaccgctgtttttctttgatccatttgatccgcttgaactgcttgtccctttgatcttaagcttttgccccggacgaatcaggtcactgctcaggctgtttaagcttttaagctcagaaacactcattttatgatttttagcaatcatccatagggaatcaccatatgcaactgtgtatgttgatgttttgcttgaattagatggggatgtcgtgctttttttgctgctttcaggaaccttaagactttgtccgacataaagcaccgttgatttcaatttgttttcggatttcagagctgatattgtcgtatcatactggcgggaaagtttccaaagagagtcaccgctttttacttttatcgtttttgcttccgcgggtgctgcggccatcgacgacccaacaactgcagaaacagccaagccggctacaatcttctttttcattcattcaacctcctaaactgttttttgcaaaaacagctagtattttgtttccaaaaatggcacgcaactgttttatcgtcaatttttcagcaagttaaacccttttcaaacatttggcagcattttcagcatcgttcgacctttaaaccttcaaataaacatctaacattttacataagcacgatatgtttttcgaaagtctaaggaactatttaagcgagggtaaaaatgatggttttctattgatgaacgaagcagtttctcctcctttcttgtctatttttctaatcaattctctatcggcgtgtcaaatccctcttatgaaatggcaaaaagcctgttctttcgataagaacaggcttttacactatgcatttgctgattgagttttttgttttacagcttcaagaatgctatcggccgcttttttagagccgcctgccgctttcagtgattgtccaatttcttttgccttttcagcatacgaaccattattcattacatcttgtatcgtctctttcagaaggctttcagataattcttctttttttaacacttttcctgcgccgactttttccacctgatctgcgacaacaaattggtcgcctcccatcggaatgacaacgagcggggtttcaaaatacaaaccttcacttgtgctgttcattccgccgtgtgtcacaaataagctggctcttttcaagatctcaagctgagggacatacgggcgtacaatgaaattctccggaatgtcgtttaactcacttgttttaatatgcttgccgatggaaagcacaactttaccgtcaaagtccttacacacttcaaggcattgattaaaaaactgcttttgattattaaaaatggttcccattgaaataaacagcacgttttcattgtcaatctgatcaaatgggaaatcattgtttccggctctttctgtaatggaaggaccgacaaatacatatcgctcgccaaattgctcagccagtggctgaaatccccttgatgtaaagacgattgtcaagtcaccatcagctaaaaaaacatcaaatggcttcttgatctctgcttgaaaatcagcatttaacgtttctgcaagctgctggtatgattcataatgaggcgaatcttcaagtgatcctttcatgtacgctcccatcatttccttcgcaaattcctcattcatcgcaaaggttgtacacaatgaaaatcttggcagcttcagcatgttggcaatgactttacccgcgagaagatggtgatcatatatgacataatcatacgattcatgtttgacttcctcataaatatgagtcgcgatatccttacaggctttcaaaaaagcgcagagcatttctgtgaaatctctttcttcatcgccggttgcgtttttcccgaagtaatctcctctgaaatcatgatactcacgaaactctatatcaagagctgtgattttttctttatattccttcactgcgtagtacgtaatgttttctccccgggatttcagctccttcatcacaccgatagagggattaatatgcccttcaccgggaaaaccgatcattaatacattagccatgcgacagcacccttcctttgaaaatttatgtaatattttatacggtactataaatacataaacaggtaaagtatttcacttaattaatattcattacatataacttttctaccagtttatatttcctgtcttcaagacaaaaagcattcagcttgaagcgaatgctttaataaagatacgaattcagtcattttgtctcatgataggattcttaatcaggccctttttattatttttacgttcttggtgaaattaacggatataatacaccgtctttggcaaacgacatcttccctgtttcctctgaaaccacgagcaccagtgcatccgtatagcccgacataccgagagccgcccggtgccgggttcccaaatggatatccacttccttcgtcgtcagcgggagcacattggctgctgacacgagtttgttttccctcactaacaaagcgccgtcatgaagagggtttccggggaaaaagatgctttcaattaatgaagagctgatctcggcgtgtagggaggtgcctttttgaataaaatgttcaaccgggtccgctctttcaatcacaattaaagctccatgcttatgttccgataaggctttaatcgccttggccagctcaataaatgccggcgtaaattcctcaatgtatgattgcaaataaaaggaggatgcaatcccctgcatgtcctgaaatatgtgccccaaatcatctaattcacaaaggagacactggtctttttcgtgaagcgttttcaagattagagatgcatcacctaatatttgctctaggtacacctgtattttccccttgaacgcattttctgatatctgctcatagcgcataatcttcatctcctgttcaaatttccaacttttcacgaatgcttatcttattgatgcacattctattggtaaaggagggatgtaaagaatggaaatcgaaagaatcattcagtatatttgcacctttttaggcgtgatttcgctttcttttatttatgcccaaatgtttagaaaaacgaaaccgacaaaaaaagaataggcccggcgttcattgctttttatacataaaatgttataatttctctcgttatgaaaaagaaacggagatcaatgtatgaaagaaactcaaaacgcccgggaaaaaatcaaacagctcttgcacattttaataccgatattcattacccaggcggggctttctcttatgacttttctagatacggtgatgtcagggaaagtcagccccgctgatttagcgggtgtcgcaattggctcaagcctttggacccctgtttacacaggacttgcaggtatattaatggcggtcaccccgattgtcgctcagttattaggcgcagagaaaaaacagaagattccctttactgttttacaggctgtatacgtggccgcgctacttagcatcgccgttttattgattggatatgctgcagttgaccttattcttggccgattgaaccttgatattcacgtgcatcagattgctaaacactttttaggctttttatcactgggaattttccctttatttgtttacaccgtgttgagatcattcatcgactcattaggaaaaacgagagtcaccatgatgattacactcagttctcttccgatcaattttgtattgaattatgtatttatcttcgggaagttcggaatgccggcacttgggggtgtcggcgcggggctggcatccgctttaacttattggtgtatctgcatcatcagttttttcattattcataaaaacgcaccgttttctgaatacgggattttccttaccttgtataagttctcttggaaagcatgcaaaaatttgctcaaaatcgggctgcctattgggttcgccgtgttttttgaaacgagcattttcgcagctgtcacgcttctcatgagccattttcatacagtgaccatcgcgtcccaccaggcagccatgaattttgcgtctcttttatatatgctgccgcttagcgtgtccatggctctaacaattgttgtcggatttgaagcgggtgcagcccgttttaaggatgcacgctcatatagcttaattggcatcatgatggcgatcggcttttctttgttcactgccgcctgtatccttttattcagagagcaaattgcgggcatgtacacttctgaccccgatgtgctccggctgacacagcactttttaatttatgcgctattttttcagctttccgatgctgttgccgcaccgatccagggagcactcagagggtacaaagatgtgaactatacgcttgcggccgcttttgtctcttactgggtcattggccttccggtcggttttatggtcggtacgtttacaagcctcggtgcattcggctattggattggattaatagcgggactcgccgccggagcagttgggctgtttttcaggctggcaaaactgcaaaaacgttattcgcaaaaacaacacatttaaaagaggtgatcaatcatggcaaaaaacaaaaaattattcgagtatctttcccagcatgcggaaaccatcagttcaacatggtatgaaacaatcgaggagactgatcccaattccatttatgcctcaacagatcctgttgtcattcacaatttaaagagccagaatcttgcctttaactataaaataaaccgtatttttatagatgatgaggacgtatacttgcctatactgaaagaatgggcctttgaagtcacacaggatcaagagcatttaaaaactcctatccactatattattcgggagtttgtcagagtgagagatttatatgtttcctatgtgaaagaatttgtccatctcaatcaggatactgtgaaaagcgaagaagccgaagacctgtatcacgcccttataaaagcgtttgatcttgtgattcatatttttatagaagaaatgtacaaaaacacaagccttcagcttcaggcccaaaaagatatgattactgaattgagcgctccggtcattgtgctgtttcacagcgtcggactgctgcctttaatcggagatattgatacagtccgcgccaagctgattatggaaaacacactgcatcaatgtgcgaaaaaaaaggtgacacaactgtatattgatttgtcaggagtagctgtgattgatacgatggttgcccatcagctgttcagtctgattgaggcgcttcgtttaatcggtgtttcttcaactttgtctggaatccgtccggaaatcgcgcaaacagcggttcagctaggtttgtctttcgaaggtatttccttgagatccactctcgcttcagcaattgcatcggacttaaaattaaaaaaggtataaggcttaaggccttatacctttttgattaatcattccattgatacgtccaatatatttcttcttcaaaccatgttgccataacaggttcattatttttcaatttctcttcaagctctctgagcatgccttctgtttgtgtgcggtgagctcttaacgcattcattttaatatcagctacttctttgatatcaagtacgacatcagcttcgccgagaacctcttctctgttgcgggtaatggccatgcagattgtacgcggacggtcttctttctttttgcggtacaatgcacggataaccgcttccccgcatgcatcatggtcagggtgcacaccgtgtccgggataaaatgtgacaattaaacttggttttacatcatctatgatctcttccatgatatcagctaaatactcatcatcttcaaattcgagcgttttgtcacggagtccaagcatacgaaggtcattgatatccatttctttgcaagcgttgatgagctcttgttttcttagcagcggcaacgtttcacgattcgcgaaaaatggatcgcccatatttctgcccatttcacctaaagtggcgcaggcatacgtaacgggaatgtctttttttctgtttaaggcaatgaggcctgccactccatatgattcgtcatcagggtgaggcaggattactaatacgtgttctttcattatttttcacccttttctttaaactgtgaacggtttttcactgatttgcagagaaatagccagtttaccgcccggcagatgtcccgccattaataaacggttttcttcatctaccgtgtattcagtcaagccttcagcataaatccagccttcttctgttttcaagccaacgcggtaaggcccgttgcctttgatttttgcctgatgataagtgacttttgcattgcggatatacgcaacaaccgtcatgttcttttcatttaagtgcgctgaataagaacctgtggtggtttctaaatggatatatacagggcggtccgcatatcgttctaaagatgcttgcacatcttcttttatgatcgctttcatgattgctcccctctttcttcttttaaatactctgcacgttctgtatgtaatttgaccagctgatatttcacagccggttcgagctgtgaattcacaatgcgctgaatcgcggcaaaatatttttccagcatcggttttcggagtcttggatgtgttcgtttatccaagagctcaagatcaatcgcctctgctaccgcttctgcgtcatcatgtgcgagagatcggttattccaaagtgaagcatatgctttcactatctctttatcattgtccatcgtcttgctcctttatgtcttacatacatgaaatgattatacataatatatgcatcagctgaaaagccaaaggcctcaatggctttttgacgcccgtttccacttcacttgtgaaaacgtaaacaagatcagcgcagcccatatacagctgaatgtaaaagccttcgagctggaaaatggctcattgtaaacaaacagcccgatcagaagggtaatggtcggcgcaatatattgtaagataccgacttgatacagtggcagccgtttcgctccttccgcaaacaataagagcggcaaagccgtaaacacaccggccaaaaagagaagcagccacgtccctccgctttctgcacccgctggctgaacatgtccgctgaacagcaaataccccaatgcaatgggcataatcatgaatgtttccagcgttaaaccgatggcgctcggcaggcttgttctttttttgcttaacccgtacagcccaaagctgaatgcgagcagaagcgcaacataaggaatggagccgtattggaacgccgagatgatgacaccggctgccgcaatcgaaacggccactaattgcaggcgattcagtttttcctttaaaaataaaatcccaaggagcactgatacaagcggattaatgtaatagccaagactagcctcaagcaaaaagccatggttgacagcccatatgtatacaaaccagttgatcgaaatcaggatagaagcaagaaataaagagaggatccctccgttctttttcagagagcgcagctcctgccatcctattttccattgccgcaagaaaaaaagtacgatacacataaaaacaaaagaccatataatacgatgagacaaaatatcaagagccggcagctgttcgagaagcttccaatagagcggaaacaggccccacatgataaaggaaacggctgtgtaaataacgcctttttttgtttctgaatattgcatttatatccctgcctttctttagagcatcttatattatatcacgtgaaagatctggcgggcatatactattttgtccgtgaagaaaggatgtgaagacaatgtttgagtggaacaagtactttcctttccacaatcaattttctaaagaagcattaaaaaaagctgatccgaaagaagttgaaacgtatgtcaatcgtgtgatggaaagtgtgttcggcagtgattatgcggctcaatttcctttccgcgatcctcttccccaaaaagaacagcccgccaaacctgatgcaaaacctgatattgatatattcgaaacagcagaccatgtgtttgtaaaggtgccaatcagcgaagaatggctggaacaagtgagaatcaaacacacatctcacgaattatggttggaaaacttcccaagagcagatcatccgaaaaaagtaaaccttccttgtttagtcaaacgcaaaggaacaaaagccgtctataaggatggccttctggaagtcatgtttcaaaagcagcaagactacaatatgtccgaggtagaaatcatccgataaaaaacggcctgcaatcgatgcaggccgttttttattaatagaaaccgggatatcccccgtatggcacgccggcaccaaaaccgtacggtccgcctccatatccataagggccaggaggataggcatagggacgagaatagttaaacagcgcactcccgagaaaaccgcctaataaaccgccgactagaggagcgccaaacaaaaaaggactacgcgccggatatccggctggacctgggattccgcgtaaatacgaatgatgagggtacatgaatttttcctcctttatgtctgcctatacgtaaagtattcagcaaggaagaaaaacgattgggctacggactgtctatgattgttacatcacaagccctgccaataacacacagccgagccctgtaaccgaaagaactgttgtaagcagcgtccaggtttgaaatgtttctttcatactcaagccgaaaaattcctttaccatccaaaatcctgcatcatttacatgacacgcaatgacactgccggctcctgttgcaagcaccattaacgcggggtttacactgccagcctctataagcggagctgccattcccgctgtggtaagcgcagccacggtagcagagcctagacacagacgcaaaaccgcggcgatggtccatgcaacgaatagcggcgacatgtttgtttgacggaaaaaatcagcgacataatcgccgaccccgccgtcaatcagcacctgtttaaacgctcctccccctcctatgatgagcagcatcatcgcaatttgcgaaattgattctgaaatagatctgctgatttcctgcatagatattttacgggcatatcccatcgtatagagtgcaagcaacagcgaaatgagcattgccgttcccggagtgccgataaattctataatgtcttttccttttgaatgttcactcaataataaagaaaaaactgttgccattgccataaagataaccgggaataaagacgtgacagcactgatcgcaaagcccggtgtttcattcagctgaaattctttccttggtcctaaccccgataggtttccatgcttttgatacgcaccaggaaaccgtttcatcgcaaatttattaaataaaggcccggcaatcacagttgtcggaacagcgatgatgattccaaaaagcagcacctagccaatatgggcaccatatgcaactgagatagcagttggagcaggatgtgggggcaaaaatccgtgagtaacatttaaggcggcggccatcgggattcccagatacagaaaagacatttttaattctttagcaatcgcgtaaacaatcggtatcaacagaacaagacccacttcaaaaaacagcgcaataccgatgataaaagaggcaaccacaaccgccgcctgtattcgtttcctcccgaatttgccaatcagcgtaatggcaatccgatagccgcccccagcatctgagacaagcctcccaagcatcgcgccaagtccaaacactaaagctaaatgccccagctgcccgccaattccagcctcaattgaaagaacaattttattgatatccattccaagtccgatctctactaaaaatgaaacgacaatcagtgagacaaaggtatttaattttactttaataatgagaaataacagaatcagcactccgacagctacaattaaaatcggcatggtacccctccaaaagtgttttatatgattctcgcgacaatgttttggcgtttttcatgcctagacgaacagaaaacgctttcattaataactaaaaacgtcttggttatatgattgttatcttttgatcaactaatatgttcatactaatctcctaatcaatgactgtcatcgtttttatgagcttgtctcgattacctaccgcctaacccaatgatttattagttatatgttgattaacttttggttatatgttatgttttttaaagttgactgccaatcattatatctattcattgtctggaagcaaatgagacaatatgagaacagacggataacaacttcacagaaggaggagtacacatgccattattgcgttttgatgtaattgagggccgtgatgaaaaatcgctgcaattgttattagatactgctcaccaagcgatggttgaagcatttggtgttccggaaagagaccgttatcaaattgtccatcagcatcccgcaaacgagcttataatccaagatacgggattagggtttcagagaaccaaggatctggtcatcattagtatgacaagcaaagcaagaaccgaaagccaaaaggaaaaattgtatgctctgcttgctgaaaggctagaagaaaaatgcggaatttcccctgaagacctcatggtatctattactgagaatggtgacgcagactggagtttcggtcttggtgaggcgcaatttttgaatggaaaactataaaatttcgtctccccacaaaaaaaagaagagagagctccaagaagctctctctttttttcataaatgcggaagtcatcagtatagaagcatccagcaatacgaaaaacctggatctccttattagatccggtttaaacgccaattggatgctgactgggttttggccgaaaatataaaattttgctgatttgcataataagataactcataatccccatttacaacaggttggatgctataacttattgatcatttccatgaacatgacacttttgccaatccggaaatgtcagtctgacaaatataaaaagtcatgtaaacggggtgtgaaccgtacttacatgactcaccatggaaacaaaggctctttttcagacgccgctttccttatttctcttcttcacacactgtgtcaccaggctcgcaaaattgatcggcccatgcctgcatctcttgaaatacagcttgaagcgctgttcctttttcagtcagcgtgtagatgactttgaccggcgtttcagggagaacctgccgttcgacaatctcgttttgttcaagctccttcaagcgctctgccaacattttttggctgatcatcggtattgtttccgttatctctttaaaccgtttcggcccatccattagcacatggatgatcagaccgttccatcgttttcccagcaatgagaatgcggattccattttagggcacatcgtatttcccacaagtcttcatcccttcatctattgattgacatgtattcaatgatccattacaataatctttcaagttacatttagtaagcttctaacttttctattatcataccacgtttatccgaaggaggaaacactatgacgaatactctggatgttttaaaagcacgtgcatctgtaaaggaatatgatacaaatgccccgatctctaaggaggagctgactgagctattagaccttgccactaaagcgccttccgcttggaaccttcagcattggcattttacagtattccacagcgatgaatcaaaagcggagcttcttcctgtagcgtataatcaaaaacaaatcgttgagtcttctgctgttgttgccattttaggcgatttaaaggcaaatgaaaacggtgaagaagtttatgctgaattagcaagccaaggctatattacggatgaaatcaaacaaacattgcttggccaaatcaacggtgcttaccaaagcgagcaattcgcacgtgattctgctttcttaaatgcttctttagctgctatgcagcttatgattgccgcaaaagcaaaaggttatgacacttgcgcaatcggcggatttaacaaagagcagttccaaaagcaatttgatatcagtgagcgctatgttccggttatgcttatttcaatcggcaaagcagtgaagcctgcgcatcaaagcaaccgtctgccgctttcaaaagtatcaacttggctgtaaggatatgaaaaaccttagtccgaaatccggactaaggtttttttatacaatcgcctctttgtaccattcacgagcctgttcagcttcatgctgagtcagctgatggcccccgtcctgccagtaaacggaggctgatgccccgctgtcacgcaaatagcggtaaagctcttctgattcttccttcgtgcaaagaggatcgtatttcccggcaccgataaaaacagggagccccgccatatcaggcagctcgataccccgaatcggaaccattggatgatgcagaatagccccttttaacacatctttataatgaaaaagcaggcttgccgcaatgtttgcgccgtttgaataaccgactgcaatcactcggccgcgattaaactgatgcgtttctgcagcctcgtcgataaaatctttcaattctcttgtccgcaccacaagatccttttcatcaaaaactccttcactcagacgtttgaaaaatcgcggcattccattttcaagcaccgatcctctgacaccaagcaaatgggcatcagggtctataaaccgccccaatgaaagcagatcgtgttcattaccgcccgtgccatgcaacagcaaaagtacgttgtcagatgttcctttttcataaatatgcttcattataaattcccccttttaaagttcaggtaaaatgtctgtaatttgttgtctatgtttctccagccattcaggcagttttaaggaagtccctagctcagcaaacgtttcatctgtcataaagcccggttcatctgtggcaatttcaaataagataccgcctttctccctgaaataaactgatgtaaagtattccctgtcgagaatttctgacgcaggcagatggttttcagcaataatcggcagccatttcgcctgttcctttttcttagtccgaaacgctacatggtgtaccgtaccatatcctccgactcctcttttttcaggatgtaaatggacatcaatgacaccgccgacggccgctgaggatgccagtctgacaatctggtcttcttcggccactttggtgtatccaaagctttccgttaacaattgtatggtcgcctgcgggtcgtaagaatatagcagcacacctttcattcccgtaattgcttcatttgttgtgatcccgtcaggcgtccactcgcttttgccgcttttcgcatcctccatgatcgccagcggaaggtcttctgtatcgtcaaaaataagacctttttcaccaaacaacgttttttcctctaggctcagcccgcttttctcaagacgctccttccaaaaagacagggagcctgagggaactgaaaagtacacccggcccgcttggccttttcctaccgttccctgtccgcttccttggaacggaaaaaaggtcattattgtaccgggatctccgttttgattcccaaagtaaaaatgatacgtcccgggatcatcaaagtttactgtttttttaacaagtctgagcccaagcacttctgtataaaatcgcaagttttcttgcggatctctggcgaatgctgtgacatggtgcaatccttctgttttcattttctcactcctatttatctcgatttcaagatatttattattttaaacctttattgaaaaggatgcaaaccatgtgttttgtttaaataactgaaaaaatcatttttttctaataattatcttgtgatcttttcttacaactgctattatagtgagcattatcatgtttcaggaggaaagtaaatggttaaaaaagcacttattgttattctcattcttttgccattcgttcagctcgcgcttttgccgcttgtgaatcgaatagaaccgattatgttcggcctgccgtttttccacttttggctgctgctgtggattattgttacgccgttatgctcgtttggcatttatcagatgcaaaaaaaagatggaggacttgaataatgcaagggaatctgactgcacttctcattactgctattattgttttaaccgttgtctgtatcggctttctcgccggaagagacaaatcctcacgtacttctgtggaagaatggtctgtcggcggcagacgcttcggcggtcttctcgtctggtttttagtaggcgctgacctttatacggcctatactttcttagggttgaccagtactgcttttacaggcggaagtgttgcatttttcgccattccttattctgtgttggcctactttatcgcctacttcttctcgccaaaactttggaaagttgcgaaaattcataaattaacaacactcgcggattatgcccgggaacgttttaacagtaagcttttggcaagcctcgttgccatcgttggggtactcatgcttattccgtacatatgccttcagctgagcggcattcaagacacgcttcaggttgccggcactggctatattaacgtaaaattcgttgtgatcatttcatttattcttgttgctctttacacattcttcagcgggattaaagggcccacatatacagccatcattaaggacattttagtatgggtcattatgctgtttatggtggtgtccctccctctcattcattttaacggctggacgccaatgattgacacgttagtgaaggaagcgccgcaaatgctgacgataccggcagaagggccaaaaggcatcccttggtttatcacagcatctattgtttccgctctggcactttttatgtgggcacacgccgctacaggagtttttacagcgaaaagcgctgatgcagttagaaaaaacagcatgtttttgccgctttacaatattgtgttaattttggtcatttttcttggctttatcgcctttcttgttctgccggaagatacaaatccaagactcgcgctgctgcatttgattcaaacatcttacggcggcgtggcacaaggttttgcatatgccactatcgctcttgcttcattaataccttgttccattatggcaatcggcgcatcgaatttattcgccaacaacctataccgggatttgattcatccgaatgtgtcgcaaagcaagctgactcttgtcacacgttcaatggtgtttgttgtcatcggtctcgcgctgctgtttggaatgctgtttccgactgccttagtgacacttcagctattaggtgtatccggtatggtgcaaatcttccctgcgattgctgtcagcctgttctggaagcgtcaaacaaaagaagcgacagttatcggattattagtcggccttgcggttacgtttattgtgtataccactcaatccgcacatggcatttatgaaggattctggggattggccgccaacatgatcgctgtggtgatcctgaatccgctgttcgttaaaaacgcgggatccaatcctgtcattgaaggtttatttggcaaaaaacaagacgctaatccaaatcaaaagggtgcataaaaaaaccatacgcggcagccgcgtatggtttttttacatttcttttttcagtgtttcaattgccttttccatttgcgtatcattatcagacagcttcttttgaagttctatcattaatttcgttgttgtatcgccagtcagtatgcctgtctctttcagcttctcttttttctggaactgtttgacgacagatacaaagtcctggtcatacgtactgttaacctttaccttgtaaccaagtgctttgagcattttctgagccactttgacgtttgtgcctgtatcacctgatttgtacgttttatctgcgtccaaatacggcagcttcgcgtaatcaggcagctcagctttcacttgaggcttgatgccttttttgtgaatccattcgccgtcagcagtcagccatttggcaactgtcagtttgacagtagagccatcatcatattcttttgccgtttgcactgtacctttgccgaatgtcgtctcgccgattaacggtacgtttgacgattcatgaagggcagcggccataatttcggctgcgcttgctgtaccgtcatttactaaaacgacggtcggcttggtcactttccgttctttttcggccttcatgacttcttttgaaccgtttttgtattcaacctgcatgatgtttttccctttatcaatgaacaggttgctcatcgtaatcgcctgttccattaagccgcccgggttgcctctcaagtctaaaatatagcctttggcgccttttttctctaaactgtcaatcgcatctgtcagctctttagctgttgtttcagagaaagaagtgatttgaatttctccgatgttgttgtctttcatctctgaatagacagtctctacaggaatggtatcgcgcttaatggaaagatcgatattccccactcccgctctgttcagttcaagcttcacctttgtgccctttttgcctcggattaaagcgacggcttcatttacattcatgccttttacgctttttccatttaccttaatgatttggtccctcggtttgataccggctttttcagcaggtgaacctttaattggggatacaataaggatttctccgtctttctcctctacttgggctccgattccttcaaaagatgctgaaatcgtctcgtcgaatgatttcgcttgctcttgatccatatatgtagaatacggatcatccagtgattgaatcattcctttaattgctccgtctactaatttgtcatcatctgttttttggtaataatcacttttgatttgctcatacgctttatttaatttgtcgaacttgctgtctcctgtgcttgctgatttttggcccaggatactggaattgcccgtaataaataaagtaagcgccgaagcgacaactgcagtgatcagcacaataaaaaacagttttaattgccgtttcaattaaacaccacctttttcttcttacattattatcatggacgaattcttattcgtcaactcggagcagaaatgaaagagaaacgcccttcttttgcttttcataaacctatgtctttatacgacatatgataaggaaaaaggaggattcgatattgagccgatatttagaaatgctgtccttattcggtgtcgcaggggcgcacccaggcgggctggctttttcaaaagcggtcttgcaaaaggctgcaccctctccgaatcagccgattcttgatgccggatgcggaacagggcaaacggcggcttatttaggacatttgctgtatcctgtaacagtcgttgataaagatcctattatgcttgagaaagcgaaaaaaagatttgcgaatgaagggcttgccatccctgcataccaggcggagctggaacatctcccgttttcttctgagtccttttcctgtgtcctgtcagaatcggtcctcagtttttcacgcctgacatcctctcttcaagaaatttcaagagttttaaaacccggcgggatgctgatcggtatcgaagctgctttaaaaaaaccgatgccccctgcagaaaagaagcaaatgatggatttttacggatttacttgcttacatgaagaaagcgaatggcataaactcctaagatcctatggctttcaaaaaacagaagcgatgacacttcttccggaagacatggaatttgaaccaaccacagaaatggatttatcgcaaacgattgatcccatctattacgatacgcttcaaactcattatcagctcatgcagttatatagtgagtacatgggtcattgtatttttatcgcgtacaagtaaaacggcgtatcgccccctgttttcgtccaacctttttttcctatctatcatatgctgatagaaagtcaggataggaggggaacaatattggagagatattatcatctttgcaaaaaccatcaaggtaaagtcgtcagaattacagagagaggcgggagagttcacgtcggcagaattacccgtgtaacaagagacagagtttttatagctccgaccggcggagggccaagaggtttcggttacggatattggggcggttattggggatacggagcggcttacggtatttccctcggtttaattacaggggtcgctcttgctggtttattcttctggtaagcatagaacaaatgctagattcaccagacacaatgaagcccgcttatctagtgtaagcgggcttttcattttaaattttcttcactttttcaaagtactcttcaagcgttaaatcattatcttggatgacctttgcggcttttttgcctacatagcgcagatgccatggctcatattcatatttcgtgatatcttctttatttttcggatagcgaatgataaagccatatttataagcattgtcctgcacccatttcccgtctgccgtgcttccgaacgcttcatttagctcaaagccattgctccggctcgaaatgtccatcgcgaggcctgtttggtgctcgctttcacccgggtaagcaaccgcttcctttgccttcttttccccttttaggcttacttcattgtcaaaaatgactttctgtctgtcatacgaacggtaccctgagacagctgccagttcatagccttcctttttggcagcatcgaacattgtttttaatgcgtcggccgcttcttttctgatgtaacgtttttgaatcttttcttcaaaagaaaactctacatctggtatgacaagatcgctaggttcatagtttccgggcagtgcatattgtttattgacaagcgcgagtatattttctggattttgaatggtttccagaccatcgacttttttaatatcattgaaatactggctttccaatgaaaactcactgttttgagtgtttgattttttgctgtcagctgttttttgttctgtttgctttgtttctgctgtggttttcgtatccttttgagcatctccgttcgacatgctgcagccggctccgactattgccgttacactcagagcggcagccagtgagaaccatttaccggactttttcatattacattaccttccttttatcaatcgtttccgcattcataaagaagaggctgccggcacccagcacgcctcttgatatattttattgtgatacggaatgtaaagccacttctatcatatcatgaaatgtcgtttgacgctcttccgctgtcgtttcttctcctgttaatacgtgatcactcacggtgagaattgacagggcttttcttccgtgcttcgctgctaatgtatacaatgcagttgtttccatttcaacgccaagcacaccgtattttgcaagtttttcaatttgcgaatcgtcattgtagaactggtcagctgtaaatacgcttcctacagtcaccggcacacctttatcctttgcggcatcataggcattttttaaaagctcgaaatctgcgcaaggcgcaaaatcaacgcttccgaaagcaactctgttcatttgtgaatcagttgaggaggtcatcgccaaaatgacgtctcgcactttgacatctttacgaatagcgccgcaggaaccgactcttattagattttgcacatcgtagctttgaattaattcattcacataaattgaaatagacggaacgcccattcccgtgccttgtactgagatttttttacctttatatgtacccgtaaatccatacatgcctctgacttcattgtagcattctacattttcaagatacgtttctgcaataaattttgctctgagaggatctcccggcaaaagcacagtatccgcaatttgtcctttttcagcacctatatgtacactcatctcatatcctcctgtaaatctaaattatcatccagcccgtccattttacaacgaatgtcatgatgaaacaaacttcagcattgattataaaggaatatgtcgaaaaaagaaatgttcgaggatctgttaggcacttcctcagaaaaacggataatcggggtgttaatttgaaaacctaaccgcaggaaggaggggtaggacatgggtaaaaaacatcgtaaccggatcaccggccaaaaaaagaacaatcatatacctgaaaaagatatcattgcagctgaagaagcacacgggaaagaatattctgctgccaaacgcaagccttaaaactgcagaaaactgcgggtttccgcagttttcttttcattatgtcgtttgtacaatcagacgattgattttcctccagccggcgggaagcagttgataatatgttttcccttttctgccctcgtcaatcaggatcacgtcccctgtggccatgaatcttgcatcataatcactcggaacagtgtcgaatacattaaacaaagagaatgctcttttcagcacgtcttgatgatcgctcccgttcagttcagttcgatagacggctctgtagccctttttttcgccaaaccggggtgtctgaaatattgtcacgtcataggaacaagacttctttttaaacacggataacatcatcaagatcccctccctcttatttctttaacatattggcgtttttgctgtgttttcctctctctatttttgtcgaaaccgcttaatcttttcgtcaaaaccttttactaggaaaaacagaagcaagccgaggctaaagccgcctaacacatccgtcacaaaatgaacccccagatacactctgcttatgccgactaaaacagcaattacaccggctatgatatataccatttttttatgcttggacaaaaacgggaggtgtttcactaaaaagtaagcaataacaggatagacacaagcagcattcatggaatggccgctcggaaaactgaaggatgattcatgaaccagcggtgcaaaatcaggcctcactctttcgatccattcttttaagactttgtttaacagccgatctgtgccgaatactaagagcatcaacaggccgtcccatgtttttctgtagaaaaacatgcctgctccaatgatgacaattagagggagcagaaaagaagaagcaccaagatgcgtgatccccgtcatgacttcattaagccatggctgacggatcaaaacagctgccttgcttattgcttcatctgcagattgaacagcatttgtatgaatggccgcagctagaatgagaaagaaaagaaacaagctaacgggcttgtacaatttaaccacctcaattttcacagaagtcatagaacacgaataataaaaccggagctgaccgctccggttttaagcctcactcatcttcatccagctcttcatctatcatacatttttctatcaaataatcaaaggtaatatcagcgatttcaaacagctcatcctcactcggtatgtagccccgtcttgcaagctctctgtaaaaaaattcagcgatttcttccgtatcaatcacaagatctatttctttcatctccgtaccgcctccttttttatgttttatgaaaaaacaggctgaattatacccggtgttctaaacaattctttcagtcatatattgaataaaaaacgagccatgggaggctgacgctatgattgctaaaatgatggaagcactggacggagaaagatttgatatcataatggaaaaaacgctcaaaggaatgacgcgtgtgatgatttggggctgtctgccatattttttatatgtcttgatccgtatgttcacaaactaactgaaatgctcttttaaactttccaaaacaaacatcatcatgtctttatattcttcatcctgaaacatttcgtacagtattttgtagtcattataaatatccagaagctcatcaacaattgacacagcaaggatgtgaagggtatcttgatcttcatcatcgccttcaaactgaagaagagcagacgatgcgatatcttcgccgatctcatggccagtttctccgacataatggacaaacaacagctgatgcacaaactggtccatttcatattttctaagcaccagcgtgagatcctcttcctccgtttcaagccactctccatcctttaaacgggtcagttcataaatgatatcttcccagccatcttctaaatatctccaaatttctgttctatggccgataatgcgaaagagttcttttccataatcttttacataaacaacgtccccaataaggaattcatactcaatatcaagcttctccatgtcgacaatgacaccctcataatctttataaagctgaatagatgattcaaagtataaaacttcgttatgattgacttcataaagatagtgtttatcaatttggtgcacttttgtgatggtgccgactgttccatacataatgacgactacgatatcccctacttggaatttcggtttattttgcttcatggtgtctccccctcgccgcaacatttctcatacgctatcgtatgccgggtgaagccaattcgcatgggcatgaaaaccaaaggaaatatccaattatggtatgggggacataaaaaaatccgcagtgatctgcggatgaaacagctattatctgccgtgcacttcagactcgtattgatcccaagcttcatcaaacgtcgccatcgtgtgaaggtaatcagcattcagctccaaatatgaactgatttcatgataatcggtagatgtttttggaaagctgtgatcctcatacgcctgattggcaaattcactgatgctgtccttcggcttagggtgcctgtatttcaataaatagtgataaaaggatttcatgggtttcccctcctggtgtctgtcttttgttgttctattatacagttcaagtgtaaaattacaacaaaagaatactgaaacatgactcaggagaagtcaaaatagttgcgtttcaaaattctttctgtctccatgagctgctgatatgtcaggctttcaggcagtttttttgtttgaattaaaagcagctgatcctcaatctcctttaccgtgttttcctcttgataggtcataccgcaggaagaacataccatggcaggggtgtctgtcagttctatagcccttgttccatcagggagctcccagtacaccgtgttcctgccgggcaccgcttcaagctcgccgcaccattcgcatgttttcatgaagaatcccctccgcattcagtctctttctgttttttctgctgcgccaaaaatttcttttctttgagctgatctcttttctcacgccgattttttaatgtttcatgctccggatttgcgatgtatgcctctctccttttgattctgtctacattttcaggtgtaaacgaaacctctttgtcagcaaaaatggcactcagcccgatcggctccttttcgtcagcggtttcagggaaaacggactcaaaataggcgtctgcctgattggggatataattctctggttccggatatgacgtaatcacaccttcaaaatttcttaagatcactttgtcaggactttgtgacaggacatagtttggctgcagggcgattttaccgccgccgcctggtgcgtcaacgacaaaggtaggaaccgcatagcctgaggtatgacctctcagcccttcaatgatctccaaacctttggaaacaggagctctgaaatgcccgattccctctgacagatcacattggtaaatataataaggacggactctgatttttaccaagtcatgcatgagctttttcataattggaaccgaatcattaatacctgctaatacgacagcctgatttccgaccggcactcccgcgttcaccagcttttcacatgcctcaacggattcttctgtcatttcgatgcttgtgttaaaatgggtgttcagccagaccggatgatattttttcaatatctcgcacagatgatcggtaatgcgctgcggaaagacgacgggcgctcttgttccgattctgatgacttccagatgtggaatgctgcgcagctcttttaaaatatattctaaaatttggtcgttgatgagcagcccatcaccgcctgaaattaaacaatctcggatttcaggtgtttcccggatataagcaattgcagcatcaagctgttttttggggactcccattccgatttgtccggaaaagcgccttcttgtgcagtagcggcagtacatggaacattgattcgtgacaagaaacagcacacggtcgggatagcggtgtgtcagaccgggtaccggtgaatcttcatcctcatgaagcgggtcttccagatcgtattttgttttgtgcatttcttcagaaagcggcacagactgcatgcgtaccgggcatctcggattgtcggggtccattaaagaagcatagtaaggtgtaatatttaaggggatcgttttagtagaaattctgacgccttcctcttcatcctcagtcagattgatgactttctttaaatcatctaacgttcttacagtatgtgtcagctgccaaagccaatcgttccatttctcttccggaacgtccttccataactcgatctccttccaatgccgtttcggtttataccatttgtttttcaaacgaattcctcctcgcgcatattttgacttacagttgcttgcaccaaatattcatgttttcaaggccttcggctataaagcaattattgatcagccttccgccattttgataacctgaatggtacaacacagcattcatcccaaaagacgaagcacgggcgagagaaaatacatgaaagatatcctttccagccatttctttttctaacgcctcgattaaaaagcttgttaacgaatggccgcgatattccggcagcacagcgcaatcggttatttctgcatgcccaagctctggattgatttctgcgcttgctgagctgatcaggcggtcatgatcaagcatgatataatacaccgtatttgcattcatcgtcttttcaatataagcggggtcaaataccggtgttgggtacgtgcggaatacttttttatacagcatcgatagctggtacatgtcgtttgtttctgcttttctcatcgtaaaaacgggtgtactgtcgttgcgaagacggggcgctgtgcgatatatggcttcgatgatctcctgttcctctgtataagaatctgtttgtctccggctttctgaaaggtaacgtaccatgacacaagccgaatagccgagataatagccctttagatagccctccggcgcaaataattgtttggcaaggatcggctcatcatgctgcttcgcatagacaatgattttttctgcattctcttcttttgccgctgccaagatatccggcagggccttctcaatagctccgtcataacggaccactctgattcgtttattaaagccgtcatggtccaaaactgctgtgacaccgctactctttattgacttgagcatccgcatcctccccatctgtatgaagcccgcaccaatccatgacaaaaagtgcaataattttagcagattctatcatggcttcaacctcaatgtattcattggcctgatgagccgtttttgtttcccccggcccgaaaacgatcactggtgtatctcctgcatggtacaaaagccctccatccgttccccacggggaagcctcaataatcggctctgtctgtttcattttttgataggctgattgcagcacagaaattaaagggtgatcatcaggtaaatcattcggcagccattgagcgccaaaccattcgacttgtacgggatggcgtttaaaccattcgtcatggtattctaaatccttcagccagttttccaattcaagttttacagcttctggtttctcatggggagcaattccgcatctcccttctataacgacacggtctgcaactgaagatggccaggcaccgcccgagatcgtgccgatattcaccggtaccggtattgggatattgtcatacagcggatctgaaattctcgcattgcggactttctccagctcttgtatcgctgtgataacgtgcatgcttttttcaatcgcgcttaccccttcatagcgtgtgcccccatgtgcggctaatcccttcacagtgatccgaaaccacatcgaaccctgctgcttaataaatagtttcatattcgtcggttcaggaatcaacgccccgtcagcacgatagcctctcatgatggcggacagtgtaccggcgccgccgcactcttcatctacaacactctgaaacaatacatctcccttcaatttgacatcgcaagcgtgcagggcttctaaagcaaaaagaagggctgtattgcctcccttcatatccgttgagccgcggccgtatattttaccgttttcttcgacagcttgatacggttcatacttccaatcctttacgcttccttcaggcacaacatcgatatggccgttcaaaatcagggacctgcctccgccggctcccgtttttttagccacgatattcgggctctcatgaaaatcggatcggttagatttaaagtagggatgctgttttaattgctttatacttggctcccatacatcaatgtccatatgaaattgccgcagcttttcaagcacaacagcttgggcgttaaactctgaccccaatgtgcttttttccccaatcagccttttgagaagacgaatggctttggccgaatgctgatcaagccacccgattacttttctttcaatgtcttgcatcctcattccccctcttaagaaaaaggcatatctattttgatttcagcatctgtcagcctcgtcacctcatcgattgtcgagccattcatcagctcttttaaaatgaagtgatggctatcgacctcaagaaccgctttttcggtaataatcaaatctacacagcctgcagcagttaatggcagcgtgcatctttctgttaatttaggccttcccttttgatctgtatgactcatgacgacaaccacttttttcgctttttgggcaagctccatcgccccgcccataccaggcaccttttttcccggaacaagccaatttgccaaatctcctgattggctcacctgcagggcgcctaaaatcgtaatgtcaattttgccttttctgatcatcgcaaaagacatggttgtatcaaaataagaagccccttttacagcgcggacaggatagcccgcggcgttgcataaatgcgcatcctcttctcccttttcgggactttctccaatgccaaggacaccgttttccgcttgaaacatgacctgcatgtcaggcttcaaaaagttcggtaccaaggatgggataccgataccgagattcacaatcatgccctgcttaatttcagtagcagcccgttttgcaatctgttctctttctgctactcccaagcccatttccacttcactccctcgcttcttacaactccctcaacaaaaacccccggtgtgacaatcatttcttcagaaatctcacctatcggaacgatacgctcagcttcggcaaaggttctcctggcggccattgccataagcggattcatattgcgcgcggttttgtcatacgttagattgccgaattcatctgcaatgtaagcattgatgaaagcaaaatcagccgtcagcgcctcttcaatcaagtatcgttttcccgccactgttacgatgtcctttttttcgcaaaccatttgattatcaatgcccacgtcggttaaaataccgccaagccccgctccgccggcgcgaatccgttccgcaagcgttccctgaggtgaaaattgaacctctaacgtcccctctgtcatctgttttccggctacaggattggaaccgatatgcgaggcgatcagggttttgacccgttgattaacaataagcgggccgatccctatatccgggaaaccggcgtcattgcagatcacagttaaatccgttacaccgctgtccaatatcgcttcaatcaatgaaggaggcgacccgactcccccaaaaccgccaaacatcagaaccgatccatcccgaacatctgcaattgctgtgtcaatgctgattgctttttgaaatgacgccatttaatgtcaatccttttttaagtttttttcgaccgctgcaactgtttctgaaaaaatagagataagctcttccatttcaccgtctgaaatggtaaaaggaggagcaataatgacagcatctccttctccactgtctattccagctttggaaggataaacaatcagcccgcgttttttcgcctcgctgacaataatctgagttatcgtctgctcttgcggaaacactttcttcgttttttggtctgccacaaattcaacgcctaatagcagtccttttccgcgcacatcacctataatgccgctttgagatgccgcctcatcaagctttttcttcagcacagcgccctttttttctgattgtttgatcaagccgtgctttaacacatatcgcaaaacttcaagagcagctttggctgaatagggatgtgcactatatgtgtgaccgctcataatcacacctgacccttgttttatcgtttcaataatagaatcagatacgacggcagcagcaataggcgcataaccggcaccgagtcccttccccagtacagcaatatcaggtacggtgtcccaatgctctgtcgcgagcatccttcctgttctcccaagccccgtcatcacttcatctgcaataaaaagcacatcgtgtgtgcggcatacctcacttaatctctcataatatcccggaggcggagtaatcgctgctcctgcagcaccaataataggctcagccacaaagccggcgatgaattggcttccgattcttttgatcatagtgtccagttcatcagctgcagtctgaacaaagtcttcttctgtctcgtgattcagccgataaatatgtggagctgagatagctggataccgttcaatgagatgggtgaaccggtatctcctttcataaaaaccagataatgaaagcgctcccaaagttattccgtggtaactgctccatcgagacaaaaagatggatttttgtgtttgctttttttcctgccaatactgaatggcgattttcatagctgtttctatcgcttctgatccgctgttgacaaaaaaagaccaattcacatctccgggcagctcctgtgccaagagcgcggctaattgctcggcgggctcactcgtaaactgtgagcggtaagcaaaagacacctgatcaagctgttctttcagcttctcagtcacatcacgaactccgtggccgatattacatgtcaccgctcctgacgagccgtcgagatatttttttccggtctgatcataaacatatgaacccttcgcataactgacaaccggataggccgagctaagctctggcttaatcaaataactgctcatgctcccacctcaaaaccccttttaccatattgtatgagtgtccaaatggcggcatgacgttccccgcaaaaactttttcacataaaaagagccttcctaatagggaaggctcttttggaatttcagcatctagcaaataaaagcggctccaacaataattaataaaatgaacaagacaacaattaacacaaatgtatttgtcccgcagccaaatccgtaaccgtacccagagtatccatacatgctgttttcatcctttcttatcacgatatacggcattttatgcgggccaagtcccaaatggtttgtgcaaacgcctatttcatgtaaggaaataatgaaatacagtatgcacccgctcatattttttaaacgtcagcttttcgtaaaactgagttgcaccgtcagtgcttgcagcaactaagtaggctgcttccattcctagtgatttggcgatggacagcatttctttcactaagatactgccgtagcccttcctttgaaactgatctaaaattgccacttcttcgattttagccgttttctcttgatgatcgataaacagctcgccgcacccaatgggaactttctgtgcctggtcgctgtaacaaacaacaagaatgattatacctgcttcatagaaaggatattttctttttaatttttgttcagcgattgcttctccaatataaatggaatcgtaaattttcataatagaagatccgtcgctaagacttttcgccgtcccccatgcggttaaaggatgtcccatctgccccttccagtcactaagcttcatgtcatatagtagctcatcctcgacgacaaaaccgctttttacaagcgactgcttcaaaccgagcggaaaaacatgctgcggcgacgcttttaaatggagataattcgcatcaagcagctttggtacggagggtaaaaagttaagtaaccgctccaatggaaacgtatcatggagctgaacaaagttatgagaaaaaatttgcggaagctgcggatctctgtatacgctgtaatgatcaaacgatgccgattcagacgttaacaatatatattgatgttccgtttttgaataatgtcctgtcatgaacgtctcctttttatgacctatacctttactctgttgcaatattcaatttctttataatctcatcgtacaccggataaaacggctttccaattggaaattgctgaatatttcggaaagaagcggagattggcttctgatgtaaaaaaaacttccttgttacttgttcactaatcgggtgaaagacgccgtttagaaacaaaaacggctcgcgttcgatgaaaaacagacgtcggccaggcggatttttgatcaattcagatcgtttccacgtaatcggcggcccttccggaagcgcctccatttcttcttttccaattgtcactatgtcttttctttgaaattgataaaattgaaacgcatactggtccacaattcgccttttttttccggcttcgatataaaatattgcaggatggtcagcttcctttactaaaatataattcggaatgtttaaaattttgccaatcctatattggaataaatatgggtctggaacagcgacagtccgatttagatacaaaaaaccccacttttctccaacaggatgccttacaccctgatcaaaaaaatacacattttgatctgaaccttttacaaaagagccgtcaatcaaatcggcgggcagaaaccgatatgcattttgaaatgaatctggggttttataggttgtgtctaatacttcatttatcggcagaaatggggtaaagttgttgagtctcgcccaaaaaattgcgtcgccatgattccaatgcttcatatcatcatcccagtagcctccaaatttatgatggatgagattaagtaacgaacggcgatgcataactgagcaatgatcaacttgaaaagcggcctgatcaagcactgcattggcatttctgtagaaatgtgagatttcctctcccctttcgtttacatgtacaactttttgttttgaatagaccgcctgcgcttcaggcttatgtgaaaactcttgcaccatacggctcagccgctcaggatgataaacagtgtcgtcagtaagataggaaatgtaatcgccgtctgcaaatgggagcgcactgttaattaatgtggcataacgggctgtttttaatcgatctgcaggatgcacgaaactgttatgatattgaatgcgccggtcatggagatacttgtgaatcaccgcagttgtttctgcattcgaatgatcatccatgataaaaagctcccaaagatcatgcgtttgctgtatcacgctttcgatcgctttttgcaaataatcgggtttgttgtaacttgttaaaataatagacactttctctcccatctataccgcctcccaccgtcaaacataaaaacggctccgcagcaagcagagcctctgtcatcatttaaaaagcaccccagcttacaacacttgagagtgaaacatgagctctcgtgttatttaacgggttttggaaaataaccaaatcagtcagaacttcttttacgatgacattttgaagtgtatctccgttgatcaaattgacttttgaaaccggtacgcccagctcttttgcaaaaacaagctggcgtctgaggtcagatggatttccttcagaagacgattgacgtatcagcagaatcagcaaaagcaaaataaaatgcagatcatcttggttttcttctcgatccacttgtttctctaaatccaaatcatccctctcccttatccttatctctgtttcacaatatgtgcgacttcgatttatggtataggctatgtccactccattaaaaaatcagcattttccttaaatagatgaaaaatagatcaggtacggcgttcgactcataccaaataacagccggaagaatatgaataacgtgagttcactatcgaataggaggtgtgtgtaatgagctctgaaaatgcacagttaaaaaaggatttaattaaagccgttttaagccctttatttccaactgcaacagaaggaggagaaaatatggatagtaatcttaaagccttgcttgatgctgccatcgatcaaaaagtagatgaaagtgaaacggttacggcagaatctattttagacccttctcttccggcaagatggatttttgccagaattacgccaggcacgacaatcagcattgtgactgattcaggtgacatgatcggaccggttgttttcgttgctttcgatcaggttcacgggatcgtatttgtaacacaggaaagctccgtcactccggcaggccaagctacaacattaattgatgtagacaaagtagaaagcgttacgttcttttcataacatccgatgaaagtcttgtatatccagtcgggatacggaggaatatacagttattttgatcgctgggctgaagaatgttttcagaacactcatacagagtatatgattgcagataaacctgaagcagaatctttgatgaagatcgaagcgtttcagccggacttcacacttatgatggttggagaccgcgttcctcacgactggctgacctggttaaagggtaaggatatccccgtgtatgtttggctgaccgaagacccattttatatggatatcagccttcaggtaattaagcttgctgacgccatattaacgatagaacaaaatgcagctctctactatcaagagctcggctaccagaacgtctattatgttccgataccagttaaccatcggctgtttaaaaaaatgggcaccgaacattcctatcattcaaatctgttaatcatcggctatccttaccctaatcgggttcagcttacgaaagaagcggtccatctgccattcacggttcgggtaatcggcaaggaatggggaaaatatctgcctaaaaaagtgctcaaacagccgcatattgatgtcgtcagcacatgggttccacccgaacaggccgttcattattataatggggcagacatcgtaattaatgcgcatcgtccctatcattttgctttcaaccaaaatactatgcgcatcaaaaatgccagttttaataaccgaacgtttgatatcgctgcatgcgaagcatttcaattaacagatttacccgcggcgcatcctttttcatcctttatttcttatcacggcatgaacgactttaaggaaaaagccgctttctatatcaaccaccctgaagaacggcaaaaagctgcagcagccaattataaagagatcgtacccgcatttacgtttgatgagcttcctgcaaaactaaaagcgattcatctggcgctctcatgaaaaatcgttcattgctatgaacgatttttttattcatagaaaaaagcagctgcacaagctgctttctattctagccgtcagaacggtctttcagcttcctcggatttacctgtttatgaagatcaggcatttcgccgagatgctgtgcaatttgttcccacgatacaattttgaaattttgattgacggcttgtccgttatcgatattttcgccgtcctgcgccacaaaaatcccgtacggatattttgggccaagtccgaaaccgagaacatcaataccatccgtgtcactagtaccgtctatcttctcgccatctgtaatctcaaagttggctacatagcgatttttcccctgccgttcatacattgcatagctgttatttccttgacttgaagccatgagatatcctttgccatttggtgcataatagattgtcagtccttcaatatcagctgtcaaatgatctcctgtcgcacggtcaacaacctgcccctttgaccctccgccgggctcagcgttaaatttccagatggcttcatcttcctctgctatgtataggttcccatactcatcatccgcaacaaggccttcggtctgagaattcaacttaaattcacgcacctttttccctgttacataaccctttccaccatcaacaatttcatactgctcaaattccccttgtttgcctgtcactaatgcgtaaaatgctcctgttttctggctgtgatacaagctgaatccataaacctcagaaatattggtggaaataggatggttcggatctgtaatgcttttcaattttcctttatccccgtctattgcatatacttcaattgtattttttccttcggaccggttggatgcggcagcaatatcaattttttcgccgttcaatggaaaatcatagcgcagatcgacattattgagcttgccaaactcataagaatgaagctgttttccgtctaaatcatacacaacgagccctgacttcttatttgttgtaatcaacttgcttttttccgggtgtttttcatgaacccaaatggccgggtcatctgctgcatcatcgccagatgcgaccggatctgtctccgtgtgtgcagtcactttgaaatgatgttcctcattcacataatgagccgacaccgaggttgctgtcaggctaagcaataaacccgcggcagtgcttagcagcattgtttttgaaaccttcatttggtaccctcctcttttatcactaacactactattgtaaaatatatacaggtgattaccgtgaggaaaatgaacctttttttatagggtttctgactcataaacaacttattccccaaagaggtggtgagatgactttgccagatttacttttgcggagcgaaataaaaatatgttgaatatttagtacattgtttatttagttttgttttttcctagttacgtccgtttttccattttctattaaaaaagaacactttgtgacatgatcattcccctaaattttgttttattggttgctttcattaattcgattacaaagttgaacatatgatgcatggtagagaaacgagagttggaggataagccatgcctaaacagcaaacagcagaactaaaaccatttttccataacaaaacagttttagtcactggcggaacgggttcaatcgggagtcaaattgtcaaacgccttttgctgcttacacctaaacaggtgattgtattcagcaaagacgacagtaaacagtatgtcatgagccaaaagtatgcggaggataagcggctattatttgtacttggagatgtacgcgatcacagaagggtgaatcaggtgatgaaaggcgtcgatatcgtctttcacgcggctgcgctgaaacaggttccgacatgtgaggaccatccatttgaagcgatccagaccaatctcatcggcggacaaaatgtggtggaagctgccctttcacaccgagtgcagcatgtcattaatatcagtacagataaagctgtatctcctgtgaacacaatgggtgccaccaagctgttatctgaaaagctgtttcatcaagcaaaccgccacgtccaaaacaaaggaaccttgttttgttcggtccgctttggaaatgttctcggttccagaggttcggtcatccccatattatttgaacagatgatggagggtgaacccctgaccatcacagacaaaaacatgaccagatttttcatgtcaatagacgatgcagctacattgacattacaatcggctgctattacaaaaggcggagaaacctttattttcaaaatggaatcactgaaacttgaagaactgattcatgggtttgaagaatatgcatcgcagcacgggctcccgcggccggctgcagtagaagtgggcaagcgtccaggtgaaaagcttcacgaagaattaacatctccacatgaaattgaatcactgtatgaatggggcaacctttatgcgatccttccagagccggaaaaacatcctgactttcgcaaagtcaatctgcctgggtatcaatcagatcaagccccgctcattacgaaagaaagaattgctcagattattgaagaattgcatcaagagaaaaaggcataaaaacaagcctgtctatccattaggcaggcctgtttttaacactttatttattaaagagatgcagatagctttcgtatccttcttcttttagcttatgcttcggaacaaaccgcagcgctgctgaatttatgcagtaacgaagtccgtttggaccaggtccgtcattaaatacgtggccaagatgagaatcagcagttcggcttcttacttctgtgcgaatcatgccgtggctcgtgtccagtttttcttccacttcttcttcttcaatcggctttgtaaagcttggccagccgcagtgggaatcaaatttatccttggatgtaaacaatggcttgcctgacacaatgtctacatacaacccttcttccttatgatcccaatattcattttgaaatggcggctccgtgccgttattttgcgttacttcatattgcatgcgatttaatgactttattttttcttctttattgtacgccatttatttagccccccaatgctcgctgataaatcccgctcgtccggaacctgtccggtagcgctgataatgtgctggattctttttataaaaatgctgatggtagccttccgcttcatagaaaggttcagcttttaaaatgtccgttacaatcggatctttaaagatgccgctttccgccagacgttgcttggaagcttccgcaagctccttttgtttatcattatgataaaaaatggctgcgcgataggaactgccgcgatcagcaaactgccccccggcatctgtcggatcgatttgctgccaaaataattcaagcagtttttcataagggaatacatcaggattaaacgtgatttgaacggcttcacgatgtcccgtcgtttcactgcacacctcttcgtacgtagggttttcagtatggccgcctgtatacccggacaccactttttcaattcccggctgttcgtcaaaaggtttaaccatacaccaaaaacagcctcctgcaaatgtggcgatttcttttttttcagacatactggtgcctcctttgttaatacgtggtattattatattatagcatgtaaaaatagaatgaaaatgattctgcttttcaataaaatctataggttttaagcaatatgcttatgtaatggaggttcacaaatttgaaagtaagaacacagatgatgtacgatatggaaactttactccgtaaagtctttaaacaaatacgcaatgaaatcaatgaaattttagataaagagctgtcgcggaatgaattcaccattcttcgaatccttagtgaacaagggcctaaaaaagtcactgaatttgcgcctattttagaggtatcggcaagccacattacggctgtgaccgatgcgctggtagaaaaggaatggattacgagaatcagatcgaaggaagacagacgcatcatccgcattcatatcactgaagcaggcgaaaaagtccttcagcactttaacgagaaaaaaacggaatatttctttaaacgctttgactgctacactgatgctgaacttgccacgttaatcgagctcttcagcaaacttgataaaaaacggtgaaaaaaagcacataccgatatataggtatgtgcttttcgcagtgcttcacttatttttcagtaaacagcttcattgctttccagcggccatatctataatacaaaaatgccgcgcagctgctaaataaaaaactcattccgattccaagcccgattcctttttgtccaagccaagctgaaaatagagctgtgaaaggatatctcaacacccaaaacgagattaaatttaataccagaacctgcagcatcgctcccgcggccctgacgattccgttcagcacaaaattaatcccaataaaagggtagaaaaacgcgatccacttcaaatattgttcaccaaatgcgaccgcatcaggctcactgataaataaccttatgagatatttaccaaatacccaaatcataaccgcaatcaccagcatgcaggaaataacagctatcacacccagccttgcaattgttcccactcttttttcgtttccgattccaatattttgccctgccatactattgacggccgtaccggcagccattgctggaagcgtgatgatgctatcaagccgctgcaccgcgccaaatcctgataccacgtgatccccgtatgagttaacaacactcataatcgccatcataccgcctgtaatcaccatcatctgcagacctgccggaatcccgagtttcaaaatcagcgcggactcttcccacttgggcattctcggaatcgagaatggcacaagcttgtgtttgatgacataaaacaacccatacaaaaacgcaatgccctgtgacaaaatcgttgaataagccgctcccgctattcccatgcggaacacagaaataaagagcggagcaagcactgtattcagtacaacagcaaacgcaataaaccggagaggtgtcttgctgtcgcccagcgcacgaagcacagtactgataaagttataaccaaacaaaaataaaatgccgataaattgaatctgtaaatacgtctcagcaagcggtatcattgactccggcgtttttagaagacgcagcaaaagctctgagagaaaaaaaccggccgcgccgaatccgatgcttaggcctgttaataaaacaacaaaagcgttaatatacgacgccattccttttacatcatcttttcctttttgctgagataaaatggttaaagtcgcattgttaaggcccaaaataaaagacagcacggtcaaaacaatcgtgcttgataccgcggctgccccaagggcctttgcccccagtaaattgccgatccacaagctgtctataaattgaaaggaaacctgcaatgcgtttccaagcataataggcattgaaaacagtacaagctgtttcagcacgttcccctgtgtaaaatcgtatgctttcatcttttctccttgtgttctcaaattttcttcggaccgcacgaaaaaagagacgttgtttcatgtctcttttttcatgacttatcggttttttttcggtctcgcataccgaatgtaaacaccatcacacttaggaacaaggcacaataggaaacattcaaatacatttgatccatgtcttcagcagccagatgatgataagcaagccagccgaagtacagggaaaatgtaaaggataataaactgaaatactggtaaatctttttcattttcagtcacctctattgtttaggatggtaataggaaaactcaatttcatctttttctaaatttatcttatccgctttgacatacattccattcgttaaaggcatttctgacaaacgcacttcaatgcttttatctccggggtgaacatggacaaatgacggcaattcataaaagctgtccatataatttaacacaaagctaattggtatactcaatttccctaacgaaaatttcgtgacattcagctctacatcaccgttttttttcacggtcggctcaaaagcgataaacgcatcaatagacgtggaaaatgccttgattttccctgcgacatgaacatcatcatcaatctctactttataatcaagcttatttgatgctttgtcgtttaaatatgagttaacaaacgcagctaatgattcttttgtgcttgtcacttgaaatccatactcgctctcagatgaatccttcacctgagcctgttcccccgggagcaaaacaagtgccacaaaaccggcggcgaggataaaattaattgcaagcaatataaaaaacagtcgcttccacttattcatgctgtcaccctactctttcggtaatccttcttttttaatggcttgatagacgcgctttgcgataagagaataacccgtaccattaggatgaaaatcatcttcctcagaaattcggctgctgtcccttttttgattgaacaaatcttcgatatgaacgatttttgcatgtttatcttttttcagctctttttcagcaatatggttccaatccgtgacgacaccatttatttcatttagttctgataatgtaaacgtaaacggattgtacatactgacataaatcagctcagcgtgatcattcagctcgcgaatttcagaaatgattttttcaaagcgcttttcgtacggtttttccgcttcctgaaacggttcaacggttaattgcagaaagttttggcgaaggattttcatcaaatcattaccgccaattgtaaaaaagacataatctgcgtcctttatgcctttttgaacctttttatcttttagtttttctaataaatcatccgaacggttcccttttacagcataatttttcacgtcgaccgttttgacttgtttatctgaccggatagaatccgccaccttgccgacatatccctttccttcgggatctccgactccttctgtcagcgaatctccgacagccgctatgacaatgtgttcttttgttttcgtttcatgggctttttgttttccctcagatgatgtacgtatgctcgtacacgcagtaagaagcaaaatcaaactggccatgattgaaaaaatgcgcagcttcaatcttgttgctccttcccattctactagtggaaagtgtatcatgttttagaagatttgcaaatgcctagtctcttagcttacttgagtgtactggctgactttacatcggaaatgatatcatcgtacggtgtattctccactccattgtaatctttcagcaccttaccgtccggacctaccaaataaaaagaagattgatgaatcacttggtcctctccctccggcttctttacgatcgctttaaagctcttaagtgcgaactcctcaatctcactctggctgtatccagtgagaaaatcccagttatcaaaagataatggataatttgcggcaaatttcttcagctgtttcggcttatcgttttctgggtcaacactaaatgatatgatgcggacatctatattttcggctttcaattttttttgcagatcggtcatatgagcggtcattggcggacatacagtttcacaattggtaaaaataaaatccgccagccatacttttccttttaagctctctaaagaaacgttcttgccgtcttggttttgaaatgtaaaaggctccacctcgtaattgagcggatttttaatctgctgtcctccgcatgcacacaaaaacagaaaaatcagcccagccgttaaccccttgataaccttcatgacatccatcctttccagccagcataaaaacgctttctaaaaccgtccttactgtcccatgtttgtattcgatactgagcaaaaaaaatcctgcatgcctccccattaacgattacaaaggagggcatgcaggtaaaaaacggcatgttacgcgttgtgctttaacacctcttgatgaaatacagcctgataatctgcccacttcatccggcgcttcatataatgtcggaaagaatacacttttgccctgctatttgatgaaaacacttcttttaagtagaattgcaaatggtgatgtaacataaagaaatagtgctcatcttcctttaatacaggtatttctgtcactttcacctgaatcccgtcaccgcgtttgaactctaggcttttgagtaacaagctatcaatcctcttttttgtttttcttctattatatatgatgccagccgggctgtctgtcattttgcgcggttgtgtaaaaaaattagattagcaaatggaacaagtcctcatccttgttcacctctacataatgaaacggttttttgttcatccgttcaatcagcggcccataatcggctttgttctgcagctcgatgccgacaagagcaggtccgttgcttttattatttttcttcgtatattcaaaccttgtaatgtcatcattcggcccgaggacttcgtcaagaaattcgcggagcgctcccgctctttgcggaaagttgacgataaaataatgttgaagaccttcaaaaatcaaggaacgctccttcatttcctgcattcttccgatatcgttattgcccccgcttaccacacacaccacgtttttccctttaatttcatccttgtacaaatcaagcgctgcgacagaaagagctccagccggttcagcaacaaccgcacattcgttatataattcaagaatggatgtacatacttttccttcaggcacgaggagaatgtcatcaacgacagtttccagcgtccggaaggtttcctcgccaatttttttaacagccgcaccatctacaaacttatcaattttatcaagtgtgacgacatgcccagctttgtttgattcaaagtaggatgccgctcccgccggctcaacagcaattacctttgtatcaggagacacgtttttcaaatatgtacctaccccagagagaaggccgccgcctccgacacttgcaaaaagaaaatgcggttctgtatcaatgtcgtttaaaatctcgactgcgagcgttccctgtccggccatcacatccggatcatcgaatggatggataaacgtccgagattccgcctcacagcattcagcagcgcttttatacgcgtcgtcaaacgtatcgcctgtcaaaataatatcgataaatccttttccgaatagttcaacttgagatactttttgtctcggtgtagtagacggcataaaaattttcccgtgaatgccaagatgtttacacgaaaatgccacaccttgagcgtggtttccggcacttgcacacacaactccgttctctgtctgctcgctggaaagctgtttcattttatgataagcccctctgagcttaaaagatctgacaacttgcaagtcttcgcgttttaaatagatattgcattcatatctctcagaaagtctgtcattcctctgcaaaggtgtgtgaatgacaacgtcctttacgttttggtgagccttcaaaatgtctttcacttggatgagagagttttctttaagcaacggtttcatgtacagattcctttcttgttttaaatccctatttaatatgccattataacatgaatattcaaaaaataagacaattatttttatttaataattaaaaaaatacagactatgtccaccacatcttgtggtaacttctgttcaaccattatcctgcagagccaagaaaaaagatgatcgtaaaataaagggtgttttcaaccaaaaggcatgatataatgaaaccaattagaaccaaaaggagccaattgatgaatagtgcaccaaaactcaatacatttcaacatctaatcggagaacatcaaactttcctggaagcgaagcgaatcgccaagcagttctcgttatcggagcttcctgtcttaataacaggaaaaatcggaacaggcaaaaatcacttcgcacatgccatacacttggaatcttcgagaagcaatgaaccgtttataagcgtcaattgcagcacccattcggaagaaacccttattcatgagctttttggccctaacggaaacacaggtgtttttcaaaaagcggtacgaggaaccctttttcttgatgatgtatggcgcatgcctgcttctgtacaagctcagctgttaaaagcgcttgattcagacacggagaaaccgcgaatgatctgtgcttctgcagaccgatctgtggaacatacattcaggcaagacttattctacagactgaacattttaacgctcacactgcccgaattatcggaacgaaaaagcgatattccgcttttgacacagcattttctctcaaattccggtcagcaattgttaatcgatccctccgtttttcccgtgcttgagaaacatgcatttgaaggcaatgtcagggaattaaaaaacgctgcagattatatggcggcagtatcaagcggaggaacgatccagccatatgacctgccgccatatattagaggcgcgatagacggaaaaacgtcgaagaaaaaagcgaagctgctgactttaatggaaaaagctgagtttttgtttattttggaaacaataaaagtattgaacgaaaaaggagaacctgccagcagacggatcatttctgaacacagcaaaaatacccaaacctcgttaactcctcagcaggtcagaagccgtctcgactatttggagaaaaaagattatgtcaccaaaagccgcggacgcgcaggcacaaaaattacctttgagggcttgagctttatagagacgttaaaaaatcaaatgatctagcgatcgaaaggagaatgcacttgtttacaatcaaagaagagatcgccaatgcgattacacacggcatcggtgtcctcttatccatcccagcattagtgtttctaatcatatttgcggctaattacgggtctgcatgggacattgtcagctttacaatattcggtgtctctatgctgctgttatatttgagctccaccctgcttcacagcatcacacataaaaaaacgaaggacattttggagattattgatcatagcgcgatttacgtactcatcgccggaacctacacgccttttttgcttgggccgctgaaaggcacactcggctttaccctgttggttatcgtatggtcacttgccctaggcggaatcgtttttaaaattttctttgtgaaacggtttatcctattgtcaaccttcgtgtatttagtcatggggtggctgatgattattgcaggtaaacctttatatgcttcactgagcggagcgggtttcagcctcctttttctcggcggcattttatactctgtcggaaccatcttttacatttggaaaaagatccccttccaccacgccatttggcacagctttgtattgggcgggagcgctgctatgtttttctgcgtgctcttctattgtgtaaaggtgccgttcctttcgtaacagtaacagaaaagcgcagtcttcacgactgcgcttttttttatgcacgtaattgtttttcattggcaggtatataagcttttgaaaaggacaattcaatgtctgccggttttaagcgtttaaaaaacgagcccttttgcatgttatctgttcctttcgtttccaccatcaccaacggaagatgatagcgggccgcaagttctacaggatcaatagaaccatctagtgaaagaatcaggctttgtcccttttccagctgttttgtcacatcttcatataccttttctgaatccccgtctgaaatcacatccatccgatccagccattgcccgataaaaggcaagcggaacacttttgggttggcgataaagccggccggttcctcaatatatccagcaattaaggccagttcagccaaacgcaaacggggatgcacatacaaaacaggaccgtgtggtattggctctggctgatggatcgtcacaactgaaccggagatgccgatacagccttccaaaaacgcctttggctgttcgtacacaagagtcatctgttttttgtatgacagacggggatcgagcattgtttgattaaataattgtttcatattttttaacagcatatacacaatataaaccactagaaggctgtagcgaaccaattaaaatcctcccgctttagaagaattctttttttcatacattagaaattcgtaatcatacgggtttttttcgtctttggtcccctgctcagaagaaaccaacttccaattggattcatcaaattcagggaagtgacggtcaccctcaaactcgtgatgaattttcgtcatatacagtctgtccgcataagggaaaaggtccgtatagagctgagcccctccgatcacaaagcattcttcagggcctgaacaaatgtccagtacatcctttaatgaaccgacaaccgtgcatcccggaaattctgaagccggcgctgaggtaacgacaatatttttccgatttggaagcggacgtccgatcgattcaaatgtttttcggcccataatgattgaatggcccgatgttactttcttaaagtatgcaagatcattgggcaaatgccacggcaaatcattgtctttgccgataagcctgttggcatccatcgcaaaaatgaatgaaatcatacgcttaccgccccttttatatgaggatgcggatcataatcctcgatgataaagtcctcaaatgcaaagttaaaaatagaatcaacctttctggcgaaacgaagctgcggaagcggtctaacatctctttcaagctgcaaattgacttgttcaatatgattttgatagatatgaacatcaccaaatgtatggatgaactcgcccgattcaagcccagtcacatgagcaatcatcatggttagcagggcataagatgcaatattaaacggcacacctaagaaaacatcggcagagcgctgatacaactgacaggacagcttgccgtcagacacatagaattggaacaggcaatggcacggcggcaacgccattttatcaatttcaccaacattccaggcgctgacgattaagcgtctggagttcggatttgtcttaatatcttcaataagacgggaaatttgatcaatggtttctccatcagctccccgccaagaacgccattgggagccatatacaggtccaagttcaccgttttcatcagcccactcattccagattcgcactccgttttcctgcagatagcgtacattcgtatctccttttaagaaccacagcagttcatgcgcaattgatttaaagtggagttttttagtggtgagcatcggaaagccttcccgtaaattaaatctcatttgatatccgaaagtgctgattgttccggtccctgtccggtcttcctttttctcaccatgctctaaaacatgtctgcataaatccttatactgtttcatttttttcatcctttaaaagtagtcttctagtagtgtaacacaataaaaaatcatttctgaacccagaaatgatttttttatagtcagctgacaacaggcttttcatcctgttctttttcttcatcttgcagatcctgatgcgtatgtgcaattctgctcgccgctgctgcagcaagagctgccacaatatcatccaaaaaggtgtgaataccgtctggactttcatcaagttccttaataattccaatcttctctttatccaaataaccgaaattggtcaaaccgatcgacccgtacacattaacgattgaaagcggaataatttcatctatgccgtaaagcggttcatctgtttcaacaaggtgctgcagcggctcggggagaagcttctgttctgcaagctgatcgagtgcaaggcctgtcaaaacagcatgaataatttcacgtttgttcaggactttttctacattctccatgcaaacactgagcggcagatttggattgtatttttcctgaagtttttgaacaatccgtgcaatatcttctatcataacgccccgtttgttcagcatatcctttgttatatcgaccatttcattcattgtgtactttttcatgtctaatggcatctcctttaggcactcatccagttgggaggcgtgttgcggtcccaataaatgctcccaagctcatgatgtgattgaaatccatcttctgctgtatgataatgaaaattaaaccagtagccgtcatgaggcgggtggtctcttcgcacatggaatctgagaagatcttctccagttgtccgattgtaaacgttgaaaattttttccgttttgcccgctgaaggcatgcttgagatcacaacatcttggtacgcctcatcatcttgcaatgtcgctaaataatcactaatcacattttcgatttttggcaggatctctttccgatagtcatcctcaatgacaggagcgattctgctgccgaattttaaaaaggactgatcctcagcgctgtcaaggagctgttccttgtacgattgaaaaagcagttcaggattttgcctgtcatccgactcatcatcgtacaggtcatgctcatcataaaaagcggtgtaatcattctgctcaagactgctcggctgtccggaaggcttgtccgccataagggcagccggaggagatacgagcccgaacgttacaatggtaaataaaaccacaagggtctttctcatccacaatttcatgactgcttattcctctctattttattgtcatgtttctcttattttagcacatccaaaacatgcaagtcatgtactatatgaaactgatatgcaaattaggagattcgttgctatgcactttgtgtaaaaacgcttacaatattccatgaaaggaggctttccgcatgattgacgctctgtttgccacagtttcactcttaacattattatactttgtcgtcatggaggtcaccgattaacagaaagcccgtgatatgaatcacgggcttgtttgaatgacgccataatggaacagtgctgtttttcttttcatgacgttaaaaccaaactgttcaaaccgcggacttttccagtggtcttttagcacaacgctttttctggcgactcgtaccgcttcattgatacatccttcgtgtaaaactgaatcctctgccaaatcacgtaaaggcgcgatgccgtcagaggtctctacaggttcatgaaacattggatcgaaataaaccacatcaacagagttgtcaggaagctgtttgatgtattctaagcaatcaccattcttcacctggattcttctcatcgcagcttgaagctcttctatacccgtttcccatgaatgcagccccgtcctcactaaaacagacacaagatggtttttttcaatcccaacaacagaacccgtttcgcctactgccatacttgcgataatggcatctgaccccagcccgagtgtgcaatctaaaaacgtatccccttcagataatccggcagcccgaagcataggctcttgctctccctgtaagaagcgtttggctctaaacatcgctgtattcggatgaaaaaagaatttggcaccttgtttcgtatacagctcaaaccgctctttgccgaccacaagcaaatcacgttcagctgacctcagcaggtgttcaaccgtttgtttattccggccgcagtatggcatatttagctctttagaaagctgctttgcggtttttatggtgtgttcagacggtctatagcttgttgttatcatcttctatactcccaaaaagaaaatgcccggaaaacgggcatttagcagtgcgcatcgaaggcagcagtcagatttttcatgatttcttccatatcgtgtccttcaatttcatgacgcggaataaaatgtacgacttctttgcctttcaaaagagccattgatggtgaagaaggctcctggccagtaaaatactcacgcattttcgcagtagcttctttatcttggcccgcaaaaacagtcaccgtattgtcaggtgttttgtcattctggaggactgcctgtgtagccgcaggacgcgcaaggcctgccgcgcagccgcatacagagttaacgactacaagagttgtgccctctgccttttccataaagttttctacttcttctgctgttgttaactcttcaaaacctgctccagtcagctcgcggcgcatcggtaagacaagctggcgcatgtattcttcataagccattgacataaaaaaagccccctctagtatccttcatctgaagtaaaggatactatagagagggccggatttcaaatgttcacgccttaaaatatagaagtaagtgtccccagctgtctagattttcataataccgccggtgttggcacttgtcacaagtttagaataacgtgccaggtagccggttttcactttcggttcaaaacctttccagttcgcttttcgtttttcccactcttcttctggcacttgtacatccaagatacgtttttcaatatcaacgataatatggtctccgttttcaacaaaggcaagtggcccgccctcagcggcctcaggtgatacgtggccgattgagaggccacgggaggctccggaaaaacgtccgtccgtaatcaatgccacttttggtccgagtcccattccaacgatttgggatgttggcgccagcatttccggcatgccaggtccgccttttggcccttcgtatctgataatgacaacgtcgccttcttttacttttcggttgataatgccgtcaagcgcctcgtcctgagaatcgaatacgacagccggcccttcgtgtcttgtaatcccattctgtacgccgcctgttttaatgatagcgccgtccggagctagattaccgaataaaacagcaaggcctcccttttcagtgaatggttgatccagcgggtgaatgacgtcataatcctttacttcatgtccggcaatggtttctccaagagtttttcctgtaacagtcagcgcgtctaaatgaagcgctccttctttcttggaaagctcattcagagccgctgacacgccgcccgcttcatgaagatcttcaataaacacatccgatgcaggcgccagcttggccaagtgcggcacgcgctcagcgacttcgttaatgcgttctaaagagtattcaacgccggcttcgtttgcaagggcaagggtatgaagaacggtatttgtagaacctccgagcgccatatcgagtgcaaacgcgttatcaatcgcttttactgtaacgatatcacgcggtttgatatctttgcgaatcgtttccattaattgcgcagccgattttcttacaaactctttgcgttccggagatgtcgccagaatggttccattacccggcaaagcaagaccaagtgcttctgacagacagttcattgagttcgccgtaaacatgcctgagcaagatccgcacgttgggcatccgaactgctctagttcttgaagctcgttttcgttgattttccctgcttggtaggcgcctaccccttcgaatactgaggaaagggagatttttcgcccgtcacttgttcttcctgccgccatcggtccaccgctgacaaaaatcgtcggaatgttgatgcgcattgccgccataagcattcccggtgtgattttgtcgcagttcggaatacagaccattccgtcaaaccagtgtgcggatacaaccgtttccacagagtctgcgataatttcacggcttggcagcgaatatctcataccgatatgccccattgcgatgccatcatctaccccaatggtattaaattcaaacggcacgccccctgcttctctgattgcttcttttacgattttcccaaactcctgcaagtgaacatgaccgggaacgatatcaatgtatgaattacacaccgcaataaacggcttgccgaaatcctcttcttttactcctgctgcacgaagcaaactgcggtgcggagctctatcgattccttgtgtgatcatattactgcgtaattctgccatggtgatcctcctaaattctttcaattgtttgattggattttattttgaaaattttcagtttatttatgagctgtttttgcaaataagataaattcaggccgccctcaccttgttttgttctttcgtgtttttatatttatatagcttttctttcgatttgaaccctccaactattaatattgttacttactataaatagttttcggatatttttcaacaatattcgaaataatttttataaaaagtgaattcacataaaaaaggtgcatgatctgcaccttttttatttctattcgcctttttttctgctttccgtcatttgtttccaaacagaaccttttgcttcttctccatgctcaatacgttcaagcgccattttgacttgaaggctgacctcaaattcggggtcatcttcggcagcgcgcaaagcttcaattgcactatcatccccgacttcgtacaggaacatggccgcacgccagcgaacaagcttgctggagtcgcttaacgacttgatcatagcgggaatggcttgaggatcgccgatatcagacaggcagtctccggccgttcttctgactgatacagctttgtcctcaagtgctttatacaatagaggcagaacatcaggtgtttcaatcattcctaagtacacaacagcctgtcttctgatggacacctttggatcatccaatgccttctgtaaaaccgggatatcctcttctttcggatccatctgttccaagtgtgcataacgctttttccagtcctcatcatccagcatgtcaagcgttactttatacgctttgcgctgtacagcttgttttgcttcgccctttccttgagcggctgcttcagtcagtcgtttcagccgttcatcactgtatgccgcctgaagctcttctgtcacgtcatggccgatttcattaaagtcaccgaacctgacaccttgttctttccaagcccgctcaaacacaacatttgaagcttcagatctaagttttaagatcgcctgctgaaagcgttcaggtaagccgaagcgttcttcccgctccccatcggttaatttaacttgcataggaatgccgctgaacatctgcacaaaaacttttacctctccaaaagattcttgatcagaacgattttcttctgcgctttcagcactttccatcccaaatgcagtgcggacttgcggtaaaatgtctttccagtcgtatcttgcattccgttcaacagcaagaaaatctgcgacgtgatatacccctttaactccatctattttaaggatttccgctataacaggcggtgcgccttctgcttgctcaggtttatagttattgcttttgcccgccggaagctcttccgttaagatgactttcattgtattcgggcttggtgtaggttcaattgattttatcttcatgatcgtcctcctatagcatatctgtgacttattctatcatagtcgctccaagccttctattacgacgttttggcatcaatcccggatatttctttttctaattggcggacaaactgaagcataaaattgtgtctttcttctgccagttcccgtgcagtgtctgtattcatcatatctttcagccgcagcagcttatgaaaaaaatgagcgtaggcgctttgatcatctccataaaggctatgcccgtttgcgcccgcaaacatgaaagctctcgcaatgccgacagcaccaatcgcatcaagtctgtcagcatcctgtacggcttttccctcaattgagagcggctccttcgccagcttttccctgtctcgaaaggacatccttgttataatatgaatcaccctgtcagcattctcttttcctactccgaaaaaaacgagctggtcatatacttcgttcacagaaagcctgaccgtgtcaggcagcttcacatcaattaaatcatgaaccaaagccgcggtttcaacaatgaacaaatccgctttttccttttctccaatatacgctgcaagatctgctactcttgatacatgatgccagtcatgtccagagctttcgtcagtcaggatagattgaacccatgtcctgatttgctctgcctgcttcaattccttcacaaaaacaccctctttattgctctaatagcttcacgatagcgtcttccagctctttcggatttgtatttggtgaataacggccaacgatttctccatttctatccactataaatttcgtgaaattccacttgatcgccttagttcccagcatccctttcgcatgttctgtcaaatacacaaacagcgggtgggcatttttcccgtttacatccacttttgaaaacataggaaatgtaacaccgtaatttgtttcacaaaattcctgtatgtcagcctcttcaccaggctcttggttcatgaattgattgcaggggaaccctaagatctccagcccctcctgctgatatgtatcatataattcctgcagctgctttaattggggagtaaaaccgcacttacttgctgtattcacgatcatcagtacctttcccgcgaaaggctgaagtgtcatgtctttccctgttattgtacgtacctttatttgataaatagacatgtaagtccctcctatgtccttggtgctgattattttaccttttttaaatcgcaattcaaaatgtaaacatcatttaagaactcataagtaatttgacgatatgagcgtccgttcattatcaattcatatggctcattttttatcttatcattctataaaacattacaattccctctgacatcatggaaaatcattttactgtgaaaccaaaaggcgtgtcagtgcgttttatttaaagagttttctgttgtttcccctcaacacgcatagatagattgaaaattggcgtgaaaattcctataatgaagaaaattaaacggggaaataatggaggtggcacgttgcctattaatataccaacacacctgccggcaaaacaggtgcttgaaagtgaacatatatttgtaatggatgaaagcagagcatttcatcaggatatccggccgcaaaaaattattatattaaatttgatgccgaaaaaaatccaaacagagactcagcttctcagattgcttggaaattcgcctttacaggttcatttcacatttttaatcccaagcacacacacgccgaaaaatactgcgagagaacaccttgacgaattttacacgactttttccaatatccgtcacaagaggtttgacggcatgattatcaccggtgcgccgatcgagcatttggcgtttgaagaggtttcatattgggaagagctcaaggaaatcatggagtggagcaaaacaaatgtcacttcaaccttgcatatttgctggggtgctcaagcaggtttgtactaccattacggtgttgaaaaaattcaaatgccgaaaaaaatcttcggtgtgttcgaacataccgttctttcaaaacacgaaagattggtaagaggttttgacgagctatactacgtgccgcattcccggcatacagatataaatatggaacagcttcaagcagtgcccgatttaaacattcttaccgcatcaaaggaagccggggtttgcttaattgtgtcaaaagacgaaaaacaagtctttttgacagggcaccctgaatatgatacaaatacgcttcttcaagagtatgaaagagatttggaacgaaacctttctactgtcgaggagcctaaacattattttgcaaaaggcagcaacgagccagtgaatcgctggaaagcgcatgccacattattgtttatgaattggctgaattattacgtttaccaagaaactccttatgaatgggactaatttttctttttttagtgatacgctgagcaaaaaatatgataaaatacatctgattcagtctgcgtataacaaaaatttaaaatactggaatccaaatcatttaaaattagcttaactttttcactgcattaataattcgattatgtatttgtgttatgtttatgtatagacaataactccttacgatgcatgaagcttgcttgttgttgattacattgaggtgaatttacttgaataccaataaaagagtattaattttgactgcaaattacggaaatggacatgtgcaggtagccaaaacactttatgaacaatgtgtacggctcggctttcagcatgtaacagtttctaatttgtaccaagagtcaaatccgattgtttcagaggtaactcaatacctttatttaaaaagcttctcaatcgggaaacagttttatcgtttgttttattacggagttgacaaaatctataataaacgtaaattcaatatttactttaaaatgggtaataaaagattgggcgaacttgtcgatgaacatcagcccgatattattattaatacatttccgatgatcgtcgtgccggaatacagacgccgaactggaagagtcattcctaccttcaacgttatgactgatttttgtcttcataaaatttgggttcacgaaaacgtggataaatattatgtggcaacagattacgtgaaggaaaaactgctggagatcggcactcatccaagcaatgtaaaaatcacaggaattccaatcaggccgcaatttgaagaatccatgccggttggcccgatatataaaaagtacaatctttcaccaaacaaaaaagtgcttctgatcatggcaggtgctcacggtgtattaaagaacgtaaaagagctgtgcgaaaaccttgtcaaggatgaccaagtgcaagtggttgtcgtgtgcgggaaaaatacggctttaaaagaatctttgagtgcgcttgaggcggaaaatggtgacaaattaaaagttctgggctatgtggagcgcattgatgagctatttcggatcacagattgcatgattaccaagcccggcggcattactttgacagaagccacagccattggagtgcctgtcattctgtacaaacccgtgcctggccaggaaaaagaaaatgcaaacttctttgaagaccgcggagctgccatcgttgtgaaccgtcatgaagagattctcgaatcagtcacttcccttcttgcagatgaagataccttgcatcgcatgaagaaaaacattaaggaccttcatttagcaaactcctctgaagtgattttagaggatatcctgaaggaatcagaaatgatgactgccaaacaaaaagccaaagtgctatcgtaatggcgtacttgagagcatacgaaaatcgtgtgctctttttatttatattcagccatcaataaaagcggttacatttttttatggaacttgcccttcttttgaaaaataagccgtttcgcaacttgacgggtgctcccagatggtgtatagttgaaccatcatttaacaatgaatcaaagttaaatgatgacaaaattttttttagcacatgggtgctacagtactaggaggaattaagcaatatgcaaaacggtaaagtaaaatggttcaacaacgaaaaaggattcggcttcattgaagttgaaggcggagacgatgtatttgttcacttcacagctatcgaaggagaaggatacaaatcattagaagaaggacaagaagtttcttttgaaattgtcgaaggtaatcgtggacctcaagcttctaatgttgtaaaactctaaactcaatacatgatgatgagatgacaaatagaggagaggcattcgcctctcctatttgattttcatctggatttcaatcgccaaaatgttttgtttgcacctctgttcaatctcttcaacatacttttccattgacggttttccttttttcgcgatatccgccagttcttctaaatcactgtatatttctataaatgttttgtgaaggatcaacttcaagtctttatcatccatagctgcgttccccttctctatcaagatacctcaaatagtaaaacagtcctatttattctggttcaatagttatatcggcttatttttattttcttttctattttggtacataaatttcaaaaaaactctgcaaaataatggcggaggtgtttttggtgacttcagaatttcataaagaggatcagactggctttacggataagcggcagctggaactagcggtggaaacagcgcagaaaacaacaggagctgcgacgagaggccaaagcaaaacattagttgactctgcataccaagccattgaggatgctagagaactgtcacaatctgaagagctggcagctctcgatgatcctgaatttgtaaagcagcaacagcagctgctagatgacagcgagcatcagctggatgaattcaaagaataaaaaccgcagcttctgcggtttttatttttagtgattggttaagacatctccgtattgtttcagcttttcaccaaccgtacatttattgatacaaaatgaatgcgcataagttttgccaaattctttgcgaaactgcttcttaataaaacagtccttgcaatattcatcgtgcagttctgtcagttctttaaagatcattttcttatccaatatcgtcatctccgttacggtctaatttcgtgtggctttctacgaattgatgggatagaatttttttagcgaggccgtcagcttcctgattgtcttttcgttgtattgtttcgtaggttggagtaagcttcagcgattcaaggagtgcttctattttgtcgagccattcattatgagatggatcataacaaggccagctgccgtcaagctgattcagcacaacaagcgagtcccctttgattgtaattgaatttctgcttgccccaagctctcttacttctcttattgcttcataaagcgctgcgtattcagcttcattattggttttcagccggaagcttttattttttctcaaacgatgccggattcctcccaatgaataatagatgacgatcccgagaccggccagttcgctctccttatcgaaactgccgtcaaaataaacagtaatgtcatcaggctcttgagcaagctcctctgtcagcttttccaattccttcagcgtccagctgccgcctttctcgtcttcgaactctagctctttcatgtatggaaaacggccaagttctctggcgagcatacgtgcctgctgtgctgtcagccagtcttcgctaaaaaatgagacggatcccgttccttttgcttctattttcaaatgcggtctgagcttcattacaatcaccttaccattcattagttgccgggcttatgctataatcaaaccaatcttaccccggaaaggaagctttttcatcttgtttaataattcgttttggatcttttttgcgatcattcattttatcattgttcttttattttataaaggatttggcaaaatgggactgtttgtttggatcggttttgcgacagtctgcgccaacctccaagtcgtcaaaacagttgaactgtttggcttaacagcgacactcgggaatgtgatgtatggcacaatcttttttgcgacagatgtgctgaatgaaaaatacggaccagctgaagccagaaaagcggtatggctcggattctcaacgctcctgacgctgacatttgtcatgcagggtgtgctgcttttcgaaccggcttccagcgacatatcacaaacagcgctggaaacgatcttcggattccttccgcgagttgcgttaggaagtctgcttgcctttatcttcagccaaacgctggatgtttatgtatattcggcaattagaaggatatttccttctgatcggcttttatggctcagaaacggcggcagtacagcagtcagccagctgtttgatacattcatattcactgcagtcgcctttctcggcatttatccggcaggcgtgtggcttcatatttttatttctacatatttgattaagtttgcggtatctttgatttcattgccttatgcttatgcagccaaaaaaatgatacctaaagatgaaaggagttcataatgcctacagaaatatacgtagacggcgcaagcgctggtaatcccgggccttcgggtattggcatttttatcaaacatgagggaacagcagaatccttctctattccaatcggagtgcatacaaatcaggaagcggaatttcttgcattaattgaagggatgaagctatgtgcaacgcgcgggtatcaatcggtttcctttcgaaccgattcagatattgtggaacgcgccactgagcttgaaatggttaaaaataaaacgtttcaaccgttcgtagaagaaatcacccgattaaaagcggcattccctctttttttcatcaaatggataccgggcaagcaaaaccaaaaagccgatcttctggcaaaagaagcgattcggctgaatgaaaagaattaaatcttgatcattggttcatcctaatggcgaggtgaactaacatgaaaaagaaagataaaggccggctgaccggcggtgttactccgcaaggcgacctggaaggcaatacacataatgaccctaaaacagagcttgaggagagagcaaaaaaaagcaatacaaaacgctagagaggatctaaacgatctctctagcgttcagcttttcaagcatacgctcaattcctttgatttggtggcggcgaagcatgtcagccgcctgctccatttgcaaagtaaataaagcgtctttcagtgtgcaggccagcggcactgagcaatgaatttccgcaagcttcctcgacatctccaaatcgcttaaaccttgctgaatttttccctgctgtccttttggaagaagagaaagattttccaataaacggtcaatcgtttcgtattcacgaatcagtttgtaggctgttttttctccaatccctttgactccgggatagttatcactggaatctcccataagcgctttaatatcaatcaaagccttcggcattacgcctgtttcttcataaaaagtctcttttgtatagactttataatttccgattcctttttgaagcaaagcaacgcttactttatccgttaacagctgaagtaaatctctgtcccctgttacgaccgtaatgtccgcttcattcgcaaataaatcggcaagagtaccgatacagtcatccgcttcatagccggcaaagccaatattcatgattccaagctctgcggctgcttcctttgccaaatcaaactgcggaatcagctccacaggcggcgcgctgcggttggccttataatcttggaacaagtcatttcggtacgttttgctccccatgtcccagcagcagacgacgtgtgtcggctggaatgtttccacagctgtaatcaaatgctttaaaaagccgttgacgccgttcgtcggcaccccgctgtcatttatcataaagttgcgatgtacggctgtggcaaaaaaggcccggaataaaagagccatgccgtcaaccagcaatagtttattattattcatcaaataactcccttttctttcattccttctattttatcataaagcagcccaaaaataaaaaacagtatctctttaattagagatactgtttggatatttatcaatcgttgtgtcttttgttgctggcgatcagcttttcagcttcgcgtcctgcgtaagagtcaaaatgggtttgaaatccgtttttctttttggcattgttattcgcctgtgcatttctgtttccgagctttgttctgcccaacatgaatccccccttacgtcggatgcatatagtatatgcttccggcaggaggttcactcgcgacaggatcatccagcttacatgcggcttacgtattctctgaccatttcttttgatacaagccgtcttgtcgggacgatgccttttttagcgagctgattcatttgctcggtaatttcattaattgcatctgtagtataaggctcatcgtttctgcatttagcaacagcttcttcaatcgccaattcacgcatattttcaagacgcataaatgctttgatatgctcgtgctgttttgatgaatgtgctgaaattgctttatgtacctctgacattaatcgttcatctcgcttttttctatttagtctatcatgacttgaaatacaagccaactgaattttacatttttattgtattgtctgaatttttccaggagatgcacgcctggtacgctatttcaatctctttcgcatgttccccttccgcatatcctcttaaatatgtctctttttgatccgttatttgcgcgattgctttttcacccatatcttcctgtaagcgtctgaggtgagctgtgtaatgagagatcaggctttcttcttcattttttatccatgcctctgtgattttcgtaagtttcatccgtacagcttcgataaaggccgattttcctttctgctcaaaaaactgcttcggtgatttgacctcttttagttcctgctcaaaagcacgttcttctatttccggttcaacttccttcaactgtatgccgttcgaatgctgatcacccgcataaacggaaaaataaccgtcctcgtttaatgttttttgaaattgatccagccattcttcattgatatgccgttcgatgaaaccgctcatgcgaacatcaagcgttttgatttcctgaatatattcaaattgatattcatgtaaggctgttgtcatcgccttactgacgttctttttccaatccccgttttgcagcccgggatgaaatgccgattttaataaatcatttgcaaaatatgataatcgctgtgtaatgtgatatagctgctctcttgtatctttttttactttttcaatgatggtttctgagttccgccgtttctcgatatcggccgctgtccgctcaaatgacagcataaggcgctgtttctgcgcttccttctcttctcgggactgatgctgggattggtgaagctgaaaaacagtttcgcatagtttgtctgcctccgaactgagctgcgctgctgacgctttttttacatccacttcgataaaccggtctaagtgttttcttactttcgggaactgattataaaatgactccggttttcccaccagttcctccttacttgatacggtaaagagctgcggctcataaaccccttcttttacaagctctgcgctgacataatcggtcactgtttcgagttctgttttatcttttgcaaggtctgcagcattaataataaaaaacattttatccatgctgagcgattctttcacaagtccaagctttcgcaaaaatgaacggtctccttttgaaaaagagtgctgataataagtcatataaaaaaatgcatcggcatctttgatatattggaatgccagttctgtatgccgtttattcatgctgctcgcgccgggtgtatcaacgatcgtaatccctttttcagtgagcgggcatgtataatagaccgttacctcttttacagcacaggccgttgtttcctctgctacatacggctttaattcagatagcggaatcgttaatttcttctgttcctgtatatactgctgatacttctcgtatgcaagcaggaaattgctgatcaatttcacgtgttcttcctgcagcctgttttttttgactgccttttcccacttctctgtgaaggaacggcctgccggttcctttggtattccggtgagctgcaaaatttcagccgttatgtcatcctctgtcttaaacactacatccgctgttttgtttaagttgccattgattggcattgtgatcttgttaattgtcgctgtggttggcgttggtgaggatggcagcactctttcgccgacaagcgcattggcaaatgatgatttccccgagctgaagcctccaaaaagagcgagtgtaaatttccgttcctcaagccttttcaccctttcacgaaacgctgaagtttgctttaacaacatgctgcattcgcttaaaaggtcagacaaagtgtaaaagcgtttgatttggtcttgaagcggcatttcttgttccattttgatttctgatttcggcatcggctgcgccgtcagctggcttcggccttgtttctgctctggagccgccactcttgttttcttcgatttaaaccattctgtgtctatatgcatggggcatgcggactcttcttcccaaatggcccacaggcgatcggttttctctcgggcattattctctaaacgcgcctgttcttgaagaaagacaagtttttctgattcttggacgagcctgtctttaattgtttgcacatctttggaaacacgctctttcaccatagcggagagcacctttatgatgtctgcggcttctcttttcgcctctttccggatgagctctgccaagtcttttgtatattgcaatacatattcagaggaaaaggctgcaccatgcttgaccgcgcgttcaatgatgcttatatcaagcggtgtgcgataggcctgaatcagcttttcactttcagcggtatagacatcaaataccttggcgagtttatgaagcgtgtctatcatatgccaatccgcttcgggctctgttcgttttgccacatcagagaaaaaagcattccgccttttatctctttcctgtgcagttttcgctttagaaaagaaaaagccggttttaaaggaaggctcttgtgattctaaaaatgcagccgccaattcacgcatttcaaaaggcgtcaggtttgcgttttttaaaatacgattgatttcttcctgcatcctcgtctctgcctcagtcgtttgtttttcggcctcattcaattgatcacgcagcgattggaccagtccaatttggatattaagctgttcagcgaaactcggagcgcctgtttcgtctttcttcagcatttccgtatgttcctttagcagattacggactttttgttcggttaaagcctgcatattgctttttgattgctgttctattcttcttaactcttctctcaggacccccatctgattgaacgggtggtccggttctgttactgacgtaaaatagagcgcttcctttgaaatcccttcattgcaaagcatctcctctacctgcgctttatagtctccaaatttcgtctccgtctcatcatggcggtcaatttgattgacgataaaatacacattcggaatgctttcttttattgatctgagaaactttacattttcctcagcgtgcacgtgattatagtgaacgacgtaaaacagcgcatccgcttggtgaagaatagaagcagccgatagaaaatgagcatcatctgttgaatctatccctggagtatcaatatacgcaaccccggaatcgatctcagtatacctgtcaaaaatttcgacgctttcaatctgttccccgtctttacaatattgctgcaccttgtctttctggtaagccccttccagctcagcacacgctccgtctgttgtatgaagccgaactcgcttttccccgtttctgatcacaacaaggttagcgcttgtcggaatcgggcttgtcggcaaaatattctccattaacaggcagttcagcagtgacgattttcccgctgaataatgcccggtaaacgcgatataaacctcttcatcagccgcttttttcatgaccgcagccagtttagcagccctttgttcatcttgattctcaataaattgcttataaatttccccagttttatgcaaaagctcttttctgttttgatctgtcataagtctgaacccctttgtgccgtttcaattgtgaacctttttcgaaagatctgaattcattcccttttcattttacacaagaataaaccaaatttctttaggagaatagaaaaaagccgccattacggcagcttctataaaagaaaatctgcaacttttacaagttccagattcatcaaacagatttattagagattccttttaatacaaaaccaattaatacactatatgtacaaaccgctccaagcaaaaacagcattgtcatttgcttcaccatcctgattgagaatctttttcaaattcattttaacatagttgagaatgattttcaatcgctattttatgctgtattcctgtaatgctttgtcttctgcgcgaattctgacgcttaacaacacggcattgaaaatggaaaacagacacatggtgacgtatgcttgataaagcagcggaatcagcaaaatttcgagtataacaacggcatagtttggatgtttcatccatttatatggacctttttttacaagctctacacctggaacaacaaggattttcgtattccaatatgcccctaaggaacaaagcgcccaataccgtacgatctgtacgcttaaaatcactgcagcgataccgagccaccagctggacggctgtttattcatcagcagcacttcggcaattaaggacaggaaaaaaaggatatgcatcgtaatgatatatggatagtggctctcgccaaattcaattgctccttgcttctttaccttttgttcgttttgcctggccactgccatttctgctgctctttgaacaatgagaatggcgatcatcaaccaaaacatgagtcaagcccccttttcccagctgaataatagcaactctgatgagaagcccggccctaatgcgccaatcagtcctcgttcatcttcctttttatgtccgttctgcagatggtctttgatcacatacaagattgtggctgaagacatatttccgtgcttttgcaaaatgctttgcgcagatgaaagcttttctgacgacagcccgagacttttgatgtatgcatcgatcactttttttccgcctggatgcgccaaaaaaacactgatatcatggaatgacagcttatgtttgtccaaaaaaatctgtacatttgttttgagccatttttccaccaaggtcggaatgtctcgtgagaaaatgactttgaatccttgatcggtaaagtcccagcccatgacatcttctgattgtttcatcaaaacagattgggcgtccattatcttcggcgcaagcttcagctttgacatcctgcggtccgccttctctccgcataataaagctgcggcaatgccgtcaccaaaaagcgaggtgccgatcagattgcttttcgttttatcttccggctggaatgtcaggctgcacagctcggcagcaatgacaagcacaaaagcctcaggatacgctttgcagtattcggctgcacgcgcaagtccgctggctcctcctgcacagccaagcccccaaatcggaatccgcttcgtatatggagaaaacggaagttcattcataagccgcgcctcgatactcggtgtggaaagacctgtactggagacgaaaaaaacagcttccactttctcataaggaatggcttcttgaaaaaattccggatgagagaggcactcacgaacagccgctctgctgtgtttaagtgtttcttctatgtatatttgatttttttcttcaaagctgtgcccctctttataccattcaatcggcttaacaaactgtctcgaatggatttgcccgtttttaaaggaggataacagccggtcaatatccttaaaagaatgctgaaacatatagcgggcgaactcggccgctttctcttggtttacattatacgcaggaagacttgttccaatggataaaataaacgccatgcgatcacctctttgcatacattgtgccgcaacaatcttttttatatgcaaaaaaactccgccgcggcggagttagactgctgttttttgttcagcgaggtcagcttcttgttctatttttttagctttagaaaaaaagttatatacaatatttaagacgactgcagtaaagctgcccgccacaatgccattcgttgtaagcagcgttaaggcactcggaagctgtttgaaaatatccggcacaacggtcacaccgagccccaatcccactgagcaggcaacaatcagcagattttcctgtttcgcaaaatcaatgcggctgagcattttaatcccgtaagcgatcaccattccaaacatcgccaccattgcaccgcccaaaacagcggatggaataatggtcgtaaaagcagcgatctttggaaacagcccaaatgccattaggatcacacctgtgaccacaatgacggcattttttttgatccctgtgagctgaacaagcccgacattttgagagaatgccgtataaggaaaagcgttaaaaataccgcccagaagcacagccagtccttcagctcgatagcctttagacaaatctttctctgtcaaacggcggtttgtcaggtcacctaaagcaaagtaaacaccagttgactccacaaggctgacaattgcaacgatggacatcgtaatgataggcgctgcatgaaaagacggcgcgccgaagtaaaatggctgaatcatttgaacaactgccgcgtccgaaacattatcaaattgaacttttcccataaaatatgcgatgaaggtaccaatcaaaataccgatcaaaatcgagacggacttgataaagccttttgtaaaacggtatagaagcacaatgatactcaacacggtaaaagcaagcgcaaggttggagagatctccgaaatctgcacttccttctccgccggccatgttattcatggcaaccggcatcagtgtaataccgataatcgtaacaacagagcctgtcacgaccggcggaaaaaacgatacgagctttccaaagaaaaatgaaataagaatgacaagaatgcctgaagcgataatgctgccgtaaactgttgaaaccccatattcagatccaatcgctatcatcggcgatacagctgtaaaggtacagccaagcactaccggaagcccgatcccaaaaaatcggttgctccacacttgcagaagtgtagccacaccgcacataaaaatatcaattgatactaaataagtcagctgctcgacggtcagtcccattgcttttccgacaatcagaggaacaacaatggcgccggcatacatggcaagaacatgctgaatccctaaagacagcgttttgccgaatccacttctcatgaatgaacctcctgtacgaaggacacttttccttcttctaaagactgaattcttgccaaagattccactcgatagcccagtttcacaagttcatctcttcccggctgaaatgacttttcaataacaatgccaattcccgcaatagaagctcccgcttgcttcacaatcgacacaagcccgtgcgctgcctgtccatttgccaaaaaatcatcgataatcagcacatgatcctgatccgacagatgggtcccagacactgcgatttggctttctgtttgcttcgtaaaggaataaacagacgctgtcagcaagttgtcggtgagtgttaacgattgatgctttctcgcgaagacaactggcacacccagcttcaagcccgtcattacagcgggagcgatacctgatgattcgattgtcacaattttggtaataccgtcttttgcaaacctggacgcaaattcgtcaccaattctctgcataagcagcggatcaatttggtgattcaaaaaagaatccactttcaatacctgatcagataatacgatgccttcttcctctattttccgtttcagtgcttccatcctgtctacctccgttatgagaataaaaaaagcattgcccgctcaaataaagagcaagcaatgctgatatcacaaaaaaccgtacacgtgcggttccattgctcacccatagtcggacatttacggtgcccggtagaaacttgcgtgccatatccacgcgaatatatgagtgttcctattatattgtaataaattatatcaagattctaatctcttgcataggctgaaaataaaaattcccgaactttaattttgtttttttagatatcattcgtatttcaaggggattcgatataaaagagcctgacgacgcgccgccaggcttttgattatgacagatagagatttgaatatttgtttgataaataatcaattaaatagcgaacattcagctcttctcctgttgcatctttaataatgtctaacggctttttccgttttccgtgaatgtgcaccttttccgtcagccattgctttatcggatggaactctcctctttccaagagagcgtcaaattcagggagatcctcaagcattttttgtttcagctgagccgcatacatgtagccgagcgcataggatgggaagtagccgaaatctccacctgcccaatggacgtcctgtaaaatcccctctgcgtcggtctgcggtgtaatccctaaataatcctggtatttttgattccaaagcgacggcagatcttccacagacacttcattgctaaaaatcgctttttcaatttcataacggatgatgatatgaagaggatacgttaattcatccgcttcgaccctgataaatgaaggttttgattcattgattgcccggacaaaatcatccagggagatgtccttgaactgttcaggtgatgcttcttgaatcttctgatagtacggtgtccaaaaatgcttgttgcggccgataaaattctcgtaaaataatgattgcgattcatgaattcccattgatgcgccgtctgacaagttcgtgccactgagtgcttcatcaatattttgctcgtatatcgcgtgcccgcactcatgaatggtgccaaagatcgccgtccggaaatctttttcatcatatctcgtcgtgacccgaacgtctccccggttcagcgtagttgcaaacggatgaacggtttcatcaagtcttccgccatcaaaatcgtagccaagctcctgtaaaaaatacagactgagctctttttgcttttctttcgggaacgcttttgtaagaaagcttgtatctggtttatttccggaagctgtcacctgtttaacaagagggataatcgcttccttcagctcagcaaacagctgatcaagcacctttaccgtgacgccgggctcaaacaaatcaagcaatgcatcataaggatgctcttgatatccccaatacgtaataaaacgtttattgaattcaatcagctgttctaaataaggagaaaacaagctgaaatcagattttcctttcgcttcctcccacgctgtttctgcctttgaacacagaattacgtattctttgtattcagcctcagggattttcttattctcttcatactcttttttcgccagttccactgcttttttcgtatcttccgacaagtcatcaaatcgttcatacaggacatcgataagctccttcattcgatctgatgtttggatattgaatatatctgttgaaagctggccgatgctttcggcacgatcctctgagccgtttttcggcgcgcctgttctggagtcccagtgcattaacgcaactgcttcgctgtaatgtgagattctttttaaaagatcaaaaaattctttttcatatgtatgtatctccatatccattccctccctattctagccgttccattacaggctaatggaagggggtatgaaagtcaaattgtttgtataaaaggctgccggtatgttttgcggcagcctttttattcagttgatcgtcatttgattttttggcggaggtgttcttcgctttttctgcttgatttttttatccacccacactgttgccagcggggttaagagcgaggtgacaataacgcttgtcgctataattgcagttgccgactcagcaactggcgcaaatgaggcattcgcttccgctaatgcgtatggcacggctacagccgcccctgccgtagaagaagcggccacacccgcgacaccgtctccccgcgcgacaaaacgatcaagtaaaaacaaggaactgcccgataaaatgacgacagaaactccgataaaaatgccgagcagccctgattggatcagcattccaaaattcaaggtattgccgagcgaaaaggcgaaaaatggaatgatcgccggcacaaccttgctgaataagtctctgagatcgtgatccagatttccaagtatacatccaagtaaaaacgggataactgtcgctgccagcgtttcccatgggaatgcggcaagtcccgtcacaccaaacgtcaccatggtcataaaaggaccagattctgtactgataaaggcgaaagcgcccgcatcctcttttcttcccatgtgattcatgagcgccaaatacagtccgccgttcgtttcattcattaccgcgacaattgctaaaacagaaaggcctgcaaaaaagccggattgtatgccttcgtcaggtataaattgcgctgcgatcacgccgagcagtgccgcaaatccgacctttcccaataataacgtgattccttttcttgcgatatagcctgaagaacgaaaatcaatcgttgctcctacgcaaaagataaaaacacccagtattggcagcgttccggtaatcaaagcacccgtaaaccctccaaagaactccgctgttccaggcgcaaacgtgttgagcgccgctccaagaaatagcggaataatcatcattcccccaggtacccgttcaattgtcgccttgattttcatattgtggattctcccatcctccggttatgaaaaaacaatttcacttacacttggaaaacagcctgcaaatcctcttttgaacagctgcccagctggctgccgactccgacggcgccagctccggctctaagccaatccggcacttcagacggatgtatcccgcctgtcggaataaaggtcacctgcgggaaaggacccgctaaatttttcataaacgggatgccaaacacaccgcttgggaacagctttaatgtcgtaaaaccgaatgtcagcgcttccataatttcgctcggagtcaagacgccggggatataatgtgtctttacaaaagatagatgttcagcaagatcagctgaaaaacccggactgacaataaactgcgcgccagcctcagcagcttccccagcttgctgcgcggtgatgaccgtgcccgcgccaattaaaatatcttccctattacggaaggattcgataatatctgatgccccgggggtcgtatacgtcacttcaactgcacgaatccctttatctaacaaactctcaatctgctgacaggcctcctgcgtatcctttgaacgaatgactgcaatcagctttgcttctttcagacggttttcaacgactttggactccatattaataatcccctttcttttggtgaaccgttctttgagcagataaaaaagaagctaatttctccctggtcggcaaaccgtccatatcccccggtgcctgcacttgcaaagcgccaatcgcatttcccctttgcaccgcatccttgtacgacaaaccgtctaggataccgctgattacaccgactgcaaatccgtctccggcgccgaccgtatcaaccacccggtcgacccggcagccttctagaaatccttcacttgtccccgttttaaagtaagcgccttcttttccaagtttaatagcaacaaagctggcaccttttttcaaataatagtcggcaatgccttcaggtgttttttctccggtcaatagctctccctctgcgatacccgggaaaaaccagtctgcaagcccagccagatcattgattgtgtgtaccattgttgcttgatcaggccaaagcgaaggtcttacattagggtcgaatgaaatggtcttccctgcgtttctcatgtcgttcatgacatgatacgtgaagtctttcatctcggctgacaaggcaggcggaatgcctgtcacatgcaaatggcctgcgcattgaaaataatctctcggatattcagctgaagttaatgtgcttgcagctgagtttttcctatagtaggtaacttgcgggtcgccttctttcacttttgacttcagcagcagcccggtgggattttcgtcctgcgagcggatcacgcgggacacatccactccctcttttttaagttcctgtacaataaacgttccgagctgatcattgccgaccttgctcatccatcccattcgaaacccgagtctggcaaggccgcaggcgacattgctttctgctccggcaagccctttagaaaaagtggatacttcatgaaggcctccatactcatttgcataaaacatggccattgattccccgaatgtcaccgcatcaagcttcatctcttcccaacctcctcttagttgagggcacctaggattaaagtgactttctcatgatgacttttgcctctaattcaatggtttgaggcgctcctttgtcaccttcaatcctttttaatacacgttccatcgccgtcctgcccatatcatgtgacggctgggcgatcgttgtaatacctggaccgatcagtttataccattccgtatcatcgaatcctgcaatccctatatcttgagggatgcgcaggccaagctcttccatacagctgatgattttcagcataatcaagccattcaaagccagaatcgcttttttttgctccggcatttccttgtgaaaagaacgaagcgccgccttaagctgctccttgtcctttacgtcaatttcaagcaatctgacaagcccgttcacattatgaaccgaagccattttctgatacacagctgctctttctgcacgagggctgatagaggaaatcggttcggtaaacagcgcgacatcagtataccctttgctgtacaccttctgaagaatctcttttgtgatccatctgttgtcagtcgttacggtatccagtttcagatccggcagtttccggtcaattaagattgttggaatttgctgttcagcaaaagcgcgcagtacatccttgttttcccctgttgcgtttaaaatcaagccctcaaccgaatgggcttctagctttaagagcatttcccgctctttttcaggactgttatctgtgttgcacaccataatgctgtatccatattgatcacaaacctcttcgactcccctgaaagcagcgaccgaaaaaggatttgtaatgtcagctacaacaaatccgattaacttgcttttttttattttcaaaccttgcgccattttactcggccgataattcaattctgcaattgcctttttaatgtttttcactttttcaggagaaatcgcgtcaatttttccgttaatatagcgggaaactgtcgatttcgaaactcctgcacattcagctacatctttgatggttgtatggcctgttgttttctttttcattcaagtgctcctgtatctcttatatttgaaaccgatttcaaaaccgttacaacaaaagaataccataattttaaaatttgggaagagtttttttaataatgtgtcaattcattattttttcgttgactcttttcactatttatcctaaaattttctttgaaaccgttaccaaaatattttcattcaagtgatgctgaaatcctaaccaagggggaaatataatggaaaatcgttattctgtacatcctgaacaagtaaaacgctttacaacagaggagcttcgcagtcatttcttaatggatcctttatttacagaaaacaaacttacgatgtattactcacatgaagaccgggttgtcatcggcggagcggctccagggcaaagtgaactgaagcttgatgcaggtgattttctaaaaacagacttctttttggaacggcgtgaaatcgggattattaatgtcggccagcctggtgccgttagagtcggcgatgatgaatatgtgcttcaaacaaaggattttctctatatcggaatggataatcaggatgtatcattttcaagcctgaacggggaaaaagcgaagttttacttcgtctccgcttgcgcccacaaaagctatccgacacaaaaagccgccctagctgaactgacaccggaccgccttggtgatgatgcagcgtctaatgtcagaagtctgtacaaagtcattcatcaggatggcattaaaagctgtcagctgatgatgggaataacgatgttagatcaaaacaacaactggaataccatgccagcacacgttcatgaccgtcggatggaggcttatctttatctggatcttgaaaaggactcaaaggtatttcatttcatgggccagccggacgaaacacgccatcttgttgttggaaatgagcaggctgtcctttctcccgcctggtctattcattctggcgcaggaacatcaaactatagctttgtgtgggcgatggctggagaaaattacacatttacggacatggatctcgttccgatggatgggctgaaataagatgggttatctacatgacgccttttcattagaaggaaaaacagcgctggtgacaggccctggaacagggatcggtcaaggaattgccaaagccctagccggtgctggcgctgatattatcggcacatcacataaaagcagcctgtctgaaacacagcagcttgtggaacaggaaggccggatatttacatcttttacattggacatgagcaagccggaagcgataaaggattctgcagctgagctgtttgaaaacaggcagatcgacatccttgtcaataatgccggcattattcatcgggaaaaagcggcagattttccagaagagaactggcagcacgtactgaatgtcaatctacacagcctgtttattctgacacagcttgctggcaggcacatgctgaaaagaggtcatggaaagattattaatattgcctctctcctgtcttttcaaggcggcatcctcgttccggcttacaccgcgagcaaacacgctgttgccggtttgacaaaatcatttgcaaatgagtgggcagcgtcaggtattcaggtcaacgcaatcgccccaggctatatttctactgcgaatacaaagcctattcgggatgacgaaaagcgaaatgaggacattttaaagagaattcctgccggccgctggggccaagcggatgatatcggggggactgcagtctttttggcatcacgtgcttcagattatgtaaatggacatattttagcagttgatggcggctggctatcccgctgacaaataaaaaaagctgacgaacgatcgtcagcttttttccattacatcatgtgcggttcaacaggcaagacctttttgacctcatcaatgatgcgttcattttctccgccagcgtaaatgtgaattgagccgctgtcttgattcgaacgaatcaggcgcccgatgccctgccgtacacgtaacaacatatatggcagatcaacttcttcgaacggatcttttttcgctccgttgcgcttcgctgtaaatacaggatcgtgtggcggaaatggcaatgaccaaatggtaacattcttcaatgcgtcaccgggaatgtcgagtccttcccataagtgaactgaacaaagtactgtttcctcttcctcttggaatttctctactaagctgctgatttcctcatcaccttcgaagaaaattggatacggcagctcccatgccgccgacagctctttaaactcgtttaattcttcaaaagaagggaaaagcaccagcgttcttcctttgtaacgtttgattgtttcaatcgtttcagccgttttttgttcagcggccatatctgtttttgcgtatagattaatactcatttgctcgtcataatcataaggggaatcaacagttaatgacaaataatcatgaatcccaagactgtcggcaatataatcaaacgaaccgccttctgacagcgtagcagaagagaagatataaggaattttcttagaaaacactttttcgccaagtacttctgctaccgttctcggcatcacgacaaaggttgattctgcttcctttttctccagccagctgatcgcatccttttgatatagagataatgaatacgccatttgttcaacatattcttccactactgacagttcgtattgatcaatcgtatacatttcagactcaaatacaagtgcctcaccgattttatcaagtaaacggcaaagctcgtccgccgcctttttgacacgatggtcattttttatttctaaacggtgtgaaccggctacttcctttgattcttcagaaagaacatagaaaaattcgtcgtttgcgagaagcgcatcttcaatcaattctgcaaactcttctctgatgtcattttgcagcaatcgttctaaaaacaattcaagagtagactgcttcactctataggttagcgctttttgcgcagcaaactctaacaagtgcccctcatcaaatacaactgcactatgatcaggcaagagcggcagctggccctctcgtttgcgtgattcttccgtccacacatgctccatataaaaatcatgggaacatatgattaagtccgttgacttgcgatagtaatctctggaaagtgtcagaccgcatctgtgtctcatatcacaagtcagacagtcctgaaacgagtcgtagcttacgtcagaccactcttcattcgatagatttgcgtactgcttacggtcgccatacggataaaagcgctgcatcgcctgtgactcgtggacaaatgacggtaacgactcataaagatccagccatttatcatcatcagaacgctgcattgttttttcaagcttcttcaagcataaatattgctcatgcgattttgacagccttgtatcaattttcagatcaagatgctcagccagcttagaaatatcgccctcttttttcactagctgttcaattaatgtttcatctgcacaagcgatgatggcgggtttgccgacataccttgcatagctgattgcaaaaagaagatataccagcgttttccccgttcccactccagcttcggcgaacatgacttttttctctttaaacgcccgctccagctgaaaagccataaatacttgctcgtcccgaagatcaaaccctttttcgggaaggatatcgtaaaacacgtcaccaatccaattgttcaattcttcataaaaattctttgttttcgttaaagaaaaaggcaaacgtgatgttgtcacctagttccaacccccaactattcgacattcagaccaccaataatatcattttccgctgatgaatacaataaaaaaacttggcaatgccaagttttttgcagtttacttacgattgatcacatgcgacgataaaaaaggatggtctgttgaataaatatgttctaccgctttttctaaattagtttgcgcatgcgaaatcatagacggagacgattcagtcccgagctccttcagctcgtttgctgttgcgtcaagcgccctttgaataagattaaaatgttcgctgttcagcatgagatcacctctgatggaaataatcatcattgtatgcgaacttttcattttatatacatgctttaccgcatgttatcaccgaaacatgcacaaactacacttgatattccgtctccggattatccgtcttatcaacaatattctatcagggagtgatgttgacatgagttatagaaaccgattagatcagcattctgaactgttccatcacaattggacgcggcctaaacgttctaagtctcaagtaaacggtcacactgaaatgtcccaaaccaacattatattgagaagcaacgcgaaagctcaccgttggtaacgatagaatagggctgaaagatgaaagaagacgcatgcagagcgtcttctttttatgcgttttctgttttcttgcgctgcggccttacttttgaccaatattgataataatccgttttaataaacccgttaaagagctttcgtttcttcgttgcttttctgccatatgcttcctcaaagttttcatttgatgtcagcatatacacagaccaagtatcaagcggctcgaacgccttccccatttctttgtacatctgctcaacggcttttttctcgccgagacgctctccatatggcgggttgccgacaattacgccaaattccagatttgtggtaaagtctttgacctgcatctgtttgaactggattagatctcccaatcctgcttcctctgcattttcttttgcgatttgaaccatgcggtggtctatgtcgctagcgaaaattgtaagcggctgatcataatttgccttttcttcgacttcaagccgcgctttgttccacagatctttaccgatccattcccaatcctctgaaacaaaatcgcgattgaatcccggggcgatgttttggccgattagcgccgcttctatcgcgattgttccggagccacagaaaggatcaacaaacgggcggtccggcgtccaattggttaattgcaccaaagcggcagcaagtgtttctttaatcggcgcaccgccctgatcgacacggtatcctcgtttgtgaaggcctgtccctgatgagtccagtgtaatcaaagcctgatctttcaataaagaaatttcgactttatactcggcacctgtttcttcaatccaatcattggctttgccggactgcagcttgagcttttcgacaattgcttttttgacgatccgctgacagtcgggaacgcttgcaagtgttgattttaccgattttccgataacagggaatttcccgttttcaggtataaatgagcgccagttaatcgctttcgttttttcaaacagttcatcaaatgttttcgctttaaaagaagcaacctgaacctttatacggtcggctgttctaagccaaaggttggcacggcagatggcaagtgcatcaccttcaaaaataactttcccgttatcaaccgtgcattcgtatcctaaatctcgtacttcctttgcgacaacagcttcaatgcccatcggcgccgttgcaattagtgtatacttcttcatcgtatcaccctgtcttttgaaacttttctcttttcaagataaaagctctccttatacgggagagcttgttttcatcattttaaatgtaagtggtctaacgttctgtaagccatgttttgttccgtcgtactgcaaacggctcatcacctcgtactcaggcggcaatcatctatctacagaaagcattctgtccttctctccgttgaattccgttaagaaggttcccctaccaaaatttgggtttctcgctcgaggggtttaccgcgttccactctcaccatttctagtgagacttcgtcactgtggcactttcaaggatactcagccatatccgaagacgtaggcttttttcctgccgtcagtctctaaagactgccctagcttatgacttcgctaggcacgaacactacgggcatctcagcaccgtgcgagcatggactttcctctacagattcaagatctgcagcgattacccgaacgttaagaacatgaattattatataacaactgtttacaatttacaagcgccatttttttcaagcgtgatcaatcataaagcttgctgccaaaaacgtgtttttctaagttagacagccgttttaaaatatcaaagtttgttgtgttagattgcacaggctgttttttgctggcttcttcaagctgttttttcagctgcagattttcctgctgcagttcttcaatttcttgatggaaggtttcataatccttaataatcatatctaaaaatttgtcaacgtcttcttgcttgtagcctctaacgcctgttttaaattctttttccaaaatttctttcgcagaaagctttactttatcagcaagcatctttttcacctcgtatcgtgaatcatcacatatattttttcagaaatctgtacggttgtcaaatttctctctcattgttagtagctgtcttcctccactgtcactctcaagtcatccattgtaataaagtagatgggatagccatcctgttcgcgccttttttccgctgtcccaagcatatacttaggggagccttccttttccgggtcatataaaagcagaagcccgtcggacttatcaatgaagaactgatttttttgtttgaattgaagcgggctttcataaggacggtgagtcaggcttgcttcatagtctgcctgagacagaactgcttcatactgttccttattcggttctttccagttcttttcctgctcgtaaaatggtgtgatgacagctacttttaagtcagggtattcctcctgcaaatcatatgcagcttctgccgcccacagctccgctccaagctggcccgaaattaaaatccattctaatccttcatccaaaaaagcaatcagccgattcttaatggctttttttatgtaatacagcgccttgtcatcctgcttaaatatcccgagttcaaacggtttatagcccgtaattgccagtactttcatcatttcacctgctttaaaaaatggggctcccgtgggccccatttgttgtgctgcattgtttacaccatcaagctgcacgttttccatactagtagtcgcagcaaggttttcctgcttgaaaatgctgatgcgtagccgggtcaacatttgagaaagtgtgtggaaagtagtgaacgtgctgaaaatgctggtggtttacgtttgttgtatgctgtgggtgaatgtgcggcacgatagtcttcgaaaacgtatggtgttcacagcaatgagtaggatggacaattggcgccatcatatgcggtctgcagtgatgcatgataaaatcccctttccataaactttattacaatactaagctatgaaaaataaggggtacatgttctgatgcaaagacctattttaaaagtgtgcaattaagctgtctttaaagtttgaaaacacaaaagcaatcaaaaataccacaacaaagaacaagtaaaaaacacccttatacataccaactctccctttaaaaataactaacgtcattttacaggattcgccgctattctacaacaaaatcaatgtgaattcagcaaaaaaaattcatggcgaaacaagtcgtcttttgcgctttcccggggaatatttaagaggaatatttcctcttcagccgggcaattctcacatgcagtttttcagtttctttctctgataagcatgccgcatcgctaagcaattgctctgctatttgcaatgcttttccggattcttttttcttatgctcaaaatatttcgcgagctctattacagcagcgtatctgcacttctggttttgcgagcgggacagcttttcccaaagcggcactgcttcttccaagcggttttgttttttgtacaggagcgataaatccagccgtgcactgtcctggtcctcaaacgatttttctataagcctttccaactgcttgatcgcttggtccgtttctttatgagccataaaccatttcgccatagcataggcttcactgtgttcttttggcgcatgtgattctgaaaggatttttttagacatatggatgtacaatgaaatgagtgataacacatccatttcattatgatgcaggacaccttttaaaagatccggctcttgcgccttgataaaatgaaagtaaagcattggcgccaagtagcccggtgtgtcttctagcctgcggatgccgagctcctctttttcaaccgtgccaagagatacacggtccattttgtgtttccacaggcgtctagctccatgcaaaagatcaaagtggccaaactccggaagcttcggaagtctgtcacggatcaaggtgtgccttgttttcacctgcggccaatcaaaggctttgccgttgtaggtcacaagtgatgtaatgtcaacctcgcttaaaaagctttggtacaaggcgacttcgttccccggtttgggcaaaagatgctgtttgactgtcactcggtcttcatatactctcgcatgcccaagcaaaaaaatggtattcccagctccacccccaagaccggttgtttctgtatcaaagaaaaagaggttgtttttgttatacccttttgctgacaatgtatgcgacaggccgctttgattccacagtgtgatcacttcttcaagctcagaaaagctgtataacccatggcggtgagaaagcggatattctacttctctgatgaggcaatattcatcttcgaagatgaaaggcttcatgccaaaagcctcccactcttctaaaaacgggatgtcatcaaagtggttttcttgtttgcctgcttctattttttgttctccttcgtcgagcgccatgtgctttttcatccgttggagtttcccttttaatgacatatccggcctccctccttacgacatttgatccaacagctgcaaaattctttcctttgcttttatcccttctatttccgtacctatacaagacggacagccgtcatgacaaggacaatgtgtaatcagttgtttcgccgcttcattaatgtctgaaaaacgtttaaagacttcctccgccaaaccgataccgcccggataatgatcatataaaaatatggttggcaatccggtatgggctgctttgatttgagaaacaacatgaacatcatttcgatcacacatgatatacacagggacaatatgctgcagcacattcgagatgccaagaagcagctgttccagtgtcttttccccgatgtcttcatccgctgttttgatttcgagccaagctgcacttgtatgcagttcttcttccggcaaatgaataggtccagacccaatattttcaaaagtggtcatttttatttttttaaaaatggtcggcagggcattgacagtgacgtctccgtagtgcaatgacgtacggcttttttctttcgttttatcgatttctaaaaccttcagctgaactgccaggtttgcatccgtataatattcgacatcgacttttctgacatacgcctttttatggtcccaatcgagcttctcaacttgatactgaacgccttcatgcaaataaatcgcttcatcatgcaaaagcgtcatcgcactaaaacggtccatttcaccgataatccttacatttgcaatatccgactgatcaactataacgacattttcctgggaggcggaacgcaaactgatgtttgaagcagggaacgactcacttgcccaatggtaccgttcgccgttgcggtgaagaacagcctcttcctcaagatactcaagaatatcactgacttccatgggtccaaattcttcatcagctctaaaaggaagctcataagccgcacactttaagtggtctactaaaataatcaaattctccggattgattcttgcagattcaggcgaacgattaaagaaatattcaggatgccgcacaatatattggtcaatcggtgttgaattggctaccatgataatcaaagattcaccgtgtcttctgccggctcgtcccgcctgctgccaagcacttgcaacacttccgggataccccgtcattacacacacttgcagctggccgatatcaacaccaagctctaaggcattcgtactgaccactcctaaaatgtcgccttctctcaggcctttttcgatttctcttcgctctttcggcagatagcctccccgatagcctctgattgattttgttccaatctcttttttcacaagctcctgaatatggcttaaaataatttccacccgaactctgcttctggcaaaaacaatggtctgcactttgtttttaaggaactctttcgccagttcattcacttctacggttgcgctccttctaatattcagcggtttgttcacaattggcggattgtaaaacacaaaatgcttgcgtccgctcggtgcgccgttgtcatcgaccagccgcatcggtttgcctgtcagctgctctcccaattcctttgggttggcaattgttgcggaagtacaaataaaaaccggatcacttccataaaaccggcagatccgctttagccgccggatcacatttgccacatggctgccgaacacacctcgatacgtatgaagctcatcgatgacgatatacttaaggttttcaaacaaactgacccatttcgtatgatgcggtagaatggcagaatgcagcatatcggggtttgtaatgacaatatgacctgcttttctcaccttttgtctgattgccggagacgtatccccgtcatatgtaaagcttttaatatcaatgcccatttcatcaataatttcatttagctcgctcttttggtcttgtgccagcgctttagtcggaaataaatataacgcccggtttgtttcatcttgggcgatggactgcaggactgggaggttgtagcataacgtttttcctgatgctgttggcgttacggtaacgatgctctctcctttttgcacatattgaaaagcggaatattggtgagtatatagttcatcaatgccccttttcgaaagggccgctttgattctctcgtctatactttcgggcataggccttgtttttgcttcccgaggctcaatttcatgccaattcacaacgttttcatttccttttaaatcagaaatgagttcagtcagtgatttctttttcattctttacacctctttgtcaagtacagtttaccgaatatttgtttgcatggctaggtgcaaattttatacagttgaataaaaaaagcaaggcatacgccctgcttatttcgctttgattgtaaggagctttgattcgcctttacgagcagccttttcgcctgccggcaccattgatcctacagcctcaccattcattataacgattgggatgactgtgctgctcgctttttcttttattaattccaaatcacatgtaatcagcgggtcaccgaccttcactttatccccttctttaatgtgggcagtaaatccttctccgttcatattgactgtctccagcccgacatgaattaacagctcaattcccgagcgagtccgaatgccaacggcgtgtttggtgtggaaaatctgaatgacttcaccttcagcgggagaaacgatttcaccgctagaaggttccacggctattccttctcccatcattttctgtgaaaaaacagggtccggcacatctgacaggtccattactgtaccgtctgccggagaataaataacctcttctgtcaccttttcctgagttttgcccattccgaataattttttcagcaatgtattttctcccttctcattcttcaaccgttatcccttcattcaccactatttaaccacactttcaattttgcttcaatttataacaacatctggcatagacgcataatctggttaaaaaaggcggtggcgaaattggaattctatgatgacaaaaagaacgaactgcaaaagaaagaagaaatcataacggaggcaatcgacactctttttcaatcctcagcgttcggcaaccttataaacggatttcagaacctaatcaactcgagtttaaaggatgtgcagacgaccatacatgtcagagaaagagatactgggctgtatatcgatattaccattccggcgacgtttcgagatggcgagatcgtcgttgatgttaaatcgaggtatctccatgtaacactccaagaaaaacagaaacaccaaaatgaggctacctttacaagcatgacaagaacggttcagctgccttatgaagttcgccaagaagatatggaaacgtcttggaacgagcagacaatgacacttttctttccaaaaaataagcatgaatgaacgattcattcatgcttctatcatttaaaaaagctggtaaatccctttattaaagatccgacctgattcattgcactcattacttgacctgtcgtatccatcattttattaaaatcaaattgcccatttgcttttttgaactgcgacataatgctttgaaattgcgaaggctgctgttgattaggccttgggataggataagggttagaaaatacaggcggctgcataggcataggctggatcggagcataaggctgataataatcctgctgtccataatgctgctgaggcagttgttgctctaaataaccgggtgcagcctgctgataatatccttgcatatgctgaggataataatagcccatttgccgaggatagcttcgagagctcccgttcattgcgattcccccctaaacacaacatatttctcttctatatatgtatgaatgacttctattgtttgtgtcacaagtgatgattagcatttgtcaaattgtgtcgaaagtttaaattttttaaaaacagaaaaaagtcgaatcattatggtaccatattttcaatacagatgagaggggatgcaccataatgaacgtatcatacttaagcaaacgttttgcagaaatgaagaaatatgaaacagactgtatgaataaactgatggactttgccaagttcctctatattcaaggacatctcagcataactgagtttcgtaacagtatgaaggttctcgaagcaaatggagcagaaagcccggcatatgagatgaattaacgtccggccccctataaaaacgaaaagaagacagccttttaccggctgtcttctcttgcaatttcatcctttactgcgtgcaatgtataaaggactgactcagtgatgtccttgaatcgttttttatgaatatgatgaacatatgattgaaggaccaattccaggaaattatcttttacggtctcaatttgctctttatgcacatattttggccggtgggcttttatcaattcaagagcaccctctgcccagcgggccgccagttcatcattctcttcaactgcaggctttatcatctcaaaaaaatcataagaatgattactgttttttccttcctgataccgatcagcgcctttttcagcaacttcaatcatttgctcggtcatttccagcaaagtttgtgatagcaatatctttcacctcaatgcctatcgtaccaaatttcactcgcaaattcagccgatgcggtataccttctcaaacgcatacctgtgttcaggcgattgatacagctcatttatacaaatatgaagatctatgatttcttcttccagcacactcaggcgatcattttccgtttcccgcatctcagcctctaatgcatttacagaatgattcaggctttgctcagctcgcgttaattcatcttctatatcagaaagcatacggagaatatctgtcttgcatacataaccggacattcgtgtacctccctttccttgtctctcccgcttaacattctttgctctcaaggctctttccttcctcatgacaaaactagaagcaaatcgccaaacaaacaggtattccacgaaaagctgaagttttcgacaaaaacacccgcaaaaattgtatgatcctcctccttaatgcaaacgatacttgtgaggaggtgccgtatgaaaacaagaccgaaaaaagccggccagcaaaaaaagactgaatcaaaggcaatcgattctttagataaaaaattaggcggcccgaaccgcccttctacgtaagaagcaaggaatttccttgcttctttattttttcagccactgctccaccgcaaaaagcgcatgaagctggcgctttttatgtaaataccagtctgtcaattcaatctgcttcggcaattcctcgcgcctaaagaacgttttctttatctttccatgaaaccaatctgttttcgttccgtctaatgagtggattaactcagggtagcatgtccttagcataggagatgttctttttgtaatcccgatcatcttttccatatcaaaacgggaacctgtgtgcggcactgtgtgcaaaaagtgataaaaagaggagaacaattctggcttgaacagcaattgagacagctgctttcccagccttatcctttcctccgcctttgaaaagcgtttcactgaaatgccgtaaaaaaacccatttgaggaaggaaaaataacggtgttaaaatgaaaccagtcacttaaataaaaaggaatcgtgtcaaaaacattctttttaaacgaaggattttgtataataggtgtttggatagtgttttgttcatttataatgagggcatacattagccgctccgtatttcgctcatgccaaaaacgggtccattcttccgacataaattgtgagacgccaaacacatgcagaagatgaaacagcggtttcccgactctttttgaccagtggtataaaagaagctgcggataggcatccgaaaaaataagccagttcgctctttcataggctaaaaagaaccatttttgctgtctctcacggagtccaagctgaaacagactgccttttaaatcagtcattgaccagcctgcattacgagaaacgaaagaagccaaaagcgaccatttgatttccggatgacggtcgtaaaatgctttataagcatttgttcttgaaatgttatccgcgttttttatttttgtctgccgctcaatccggctcagaagctttctgatgatctgttgttcttgcacgttcattcacttccgtcatgattagtttaataaggaggatgagaaagtgattcggtatcctaacggaaaaacatttcagccgaaacattcggtttcatcccaaaacagtcagaaaagggccccgtcttacagtaatcgcggaatgaccctcgaagatgacttaaacgaaacgaataagtattatctgacaaaccaaattgccgttatacacaaaaagccgacacctgttcaaattgtaaatgtccattatccaaaaagaagtgccgcagtgattaaagaagcttactttaaacaatcatcgacaacagactacaatgggatttacaaagggcggtatattgattttgaggcgaaagaaacgaaaaacaagacctctttccccctgcagaattttcatgaccatcaaatcgagcatatgaagcaggtaaaggctcaagacggtatttgttttgttattatatccgctttcgaccaggtttattttttggaagccgataagctgttttatttctgggacagaaaagaaaaaaacggcagaaaatcaattcgaaaagatgagttggaagaaacagcttatccgatttctcttggatacgcacccagaattgattatattagtattattgaacagctttatttttcgccatcatctggtgcgaaaggttgattaacgaaaggttgagatgttatgtcagatcaatttaacagccgtgaagctcgacgaaaagcgaacagcaaatcgagtccttcaccgaaaaaaggcaagaaacgaaaaaagggcggattgtttaaaaagacccttttcactttactcattctgtttgttttaggcgtagttggcggtgctgttatatttgccgtcatggtttctgatgcgccgtcccttgatgaaagcaaattgaagacgccttattcatcaacgatttatgataaaaatggaaaagagatcgccgaagtcggcgccgaaaaacggacctacgtctcgatagatgaaattcccgatgttgtaaaagaagcctttatcgcgacagaagacgctcgtttttatgagcaccacgggattgaccctgtccgtatcggcggtgcattagttgccaactttaaagacggcttcggggctgaaggcggaagtacgatcacccagcaggtcgtcaaaaactcccttctttcacatcagaagacgttgaaacggaaggtgcaggaagtatggctttcgattcagctggagcgcaattactctaaagatgaaattttagaaatgtatttaaaccggatttatttttctcctagagcatacggaatcggaaaagcggcggaagaatttttcggcgttacagatttaagcaaattgactgtcgaacaggctgcgacgcttgcaggaatgccgcaaagcccaacagcgtacaacccggtcaaaaacccggataaagcggaaaaacgacgcaacatcgtactcagtctgatgaaaaaacaaggatttatttctgattctcaatataacaaagcgaaaaaagtggcagtgaaagacgaaggcgtcgtgtcacagaaggaatatgaaaaagcaagtacaaacaaatacagcgcatttgttgaagaggttatgaaggaaattgatgaaaaatctgatgtcgatccatctgctgacggattaaagatctatacgacattagatacaaaagcacaagataaactagatgaattaatggacggagacaccgtcggatttactgaaggcatgcagggcggcgttacccttctcgatacgaaaaccggagaagtgcgggcgattggcgccggaagagattctacggttggtggctataattacgcgacccaagctaagcgacagcctggatctaccattaaacctattctcgactacggtccagttattgaaaataaaaaatggtcaacttacgagcaaattgatgactcagcttacacgtattcagatggaacacctattcgagactttgaccgttcctataaaggggtcatgtctatgcgtgaagccctcgcccaatcacgtaacattccggctctaaaagcattccaagcagtcggaaaagatgcagcagttgattttgctaatggactggggctcggattaaataaagaaaaagtgtatgaatcatattctatcggaggattcggagaaggtaatcccggtgtctctactctaactatggctggagcatacagtgcattcggaaataacggaacatataacgaaccgcattttgtgaaatcaatagaatttaatgacggcacgaagcttgacttaacacccaaatcaaaatcagcaatgagcgattatacagccttcatgattacagatatgctgaaaacagctgttaaaacaggtactggacagcttgcacaagttccgggagtggaagttgcaggtaaaacaggtacaacaaactttgatgaagcggatatgcaaaaatacaatatcgcacaaggcggtgtaccagattcttggtttgtaggatatacacctcaatataccgctgctgtttggacaggtgtagattctcaaaataagataggaaaaaaatctttaaataaaacagagcaacagattgcaaagcgcatcttcgcccagctcatcgccgatgtcgatgacggaagcggatcatttgagaaacctgacagcgtagtggaagcctctgtagaaaaaggctcaaaccctgcaaaactggcagggccaaatacgccaagcgataagaagctcacagagtactttgttaaaggcacagctccttctactgtttctaaaacatatgagaaagaagaaaaagaggaaacagctaaactgtctggtttaaacgtgaaatacgataaagacaatcaatctttaacgttaagctggaattacgacggagatgcgacctttgctgttaagcaatctgttgatggcggcagctactcagaaattcaaaacagctctgcaaaagaggcagtcatatcgggtgtgcagccaggatctgtgtacaaattcgaagtaacagccgtcagtgatgatggcaaaagtacagcttccacatcctatgaggtgccaaaagctgaagacgatgaagataaaaaagaccagcaacaaacggatgatgaaaaacaagatgatgagaagactcaggatgatacacaaactgatgattctcaaaaagatgacggtcagacggatcaagatcagacagatgattcaacaaacgatcaagacaaaaaacaagacaatacgaacaccaatccgtccgacaacaataaccaagaccaatcaaacgataacgataacgacaacagtaacaaccaggatacgtcggatggtgattcgaactctggtaagaatgattcaacaggttctgacacgaataaaaataaaacagacacatctaataaaacacaaacaaactcatcatccattgaaaaaacaaattaaacaaaaaagccgtcacctttggggtgatggcttttttggtacacaataaaaaacctcccgttttaacaggaggttttatcgattcatcgcatgatatttgtaaaaatgctttttcatttcggtaaacagctcatcaagctgaataaagcaatggtattgggtcggcttaagaagaataaattccactcgttcagcccaattaatcggctttgcgggatatgatttctccctcaattcttgccaatcgagcgatttcaccggctcacctgctgtccaatgtaacgaagccagcaaacacacaatgccctttaacatttcgttttggtcacatctcgattttcgtgtttgaaagactgggagaagtgatgctttgatgtcatcccacacttcaaataaaagcggaacgtatttcccgctgtcttcccatggcaaatcgccttgtaattccgtgcagaaatcaaaatacacgggattggtctgcaaggttttcttcatatccgaggaactcttctggccaagactgcgcaagtattgctcataagaagccaacacttcttttgcttgcgtcatcgtttcaccagtccttttttatccctcttctgcccttctctgcacaaagaaagcagcggacactccgcacagcgcggagattgggctttacagtgatatctgccgaagaaaataagccggtgatgcgtaacggaccagtcttctttgggaaccttgcgcatcagcgtcttttcaacttccagaaccgagtccttccaccggcaaatgcccaatcgtttgctgactctctccacatgggtatctacggcaatggccggcacaccaaacgcaacggataccactacgtttgcggtctttctcccgacccctggcagtttgacaagctcatcgcggtctctcggcacttctccgccgtaatcttcaataatcattttactcagcttttgaatatttttcgctttattacgatataaaccgattgatttaatatcctgctgaagctcttccagcggaacagccaaatagtcttccggccgtttatatttttggaataatgttttggtcactctgtttacaagtgcatctgtacattgcgcagataaagctacagccaccactaattcaaaaggattggaatgaaccagttcacactccgcatgaggaaacatgtcacctatcttgtctaaacagaattcaatttgttttagatttaacacgattgtcaccttttcactttattgttcaagccaattgtaaaaaggaacctgccttttatactctttttgcggttcattctgctttgcttgtacacgccggaatttttggctgtgtatttttgcctgctccacagttttaagcccgtttttcttccattcaaacaaaatccggtcaatgtagcggaaactgagttttcctgatagtacagcctcttttaacgcgtgtttgatcagttgtgcgtcatgctggtcctggtcctgccagatcgccagcgtttcacactccaaaggcgataacggccttgcgaactcttcctcaaaaatggtataaaggcttttttgttccccttctgcttttctttcctgtgtttgattctgtgcaagctgaatatactcgtacagcttgccccataaaggctgaagagaatatttctcaaatttgatgccgttttgatcctcgcattcttcaataaacagaaagcctttttgaataaacatccgcaatctgtttgtgcattcttcaacagaaattgacataccttcctgcagctgattcggtgtaggaaaatatgatcctttttctaaatgcattttaatttttaacagcagaataagttctgtttcattaagcccaagctgtttataatgcgtgagcagaagattggggatggttgatgttccctgctcctgcatatcaataaattgctgttttttcatcgtcacacctcttactgtaaaggattgtgattacccctttactgtaaaaagtctcccttgcaggagactcttttttgtttcatttgaatgtattacggatacagacggtttaacagtcttgggaacggaatcgtttcacgaacgtgaggcgctccgctgatccaagctactgtccgctctaatccaaggccgaagccggaatgaggaactgatccatattttctaagttcagcataccatttatatgcgtcagaatccagtccatgttctttaagacgcgattccaaaagttccatatcgtgaatccgttcagacccgccgatgatttctccatagccttccggcgcaatcaagtcagcgcaaagcacaacgtcctcacggtcagaagccggctgcatatagaacggttttaaggacgtcggatagcgagtgatgaataccggtttgtcataatgttcagcaatcgctgtttcatgaggcgctccgaaatcatctccccactcgatatcgtcaaagcctttttctttcagaaattcaatcgcttcatcatacgtaattcttgggaacggggctttgatttgctcaagttttgacgtgtctcttcccaatgtgtttaattcaattttacaattcttaagaactgattgcacgatgaaagaaacgtaattttcctgtacttgaaggttttcttcaaattctacaaacgccatttccggttcgatcatccagaattcgattaagtgacgctttgttttagacttttccgctctgaatgtcggtccgaaagagaatacttttcctaaagccattgccgcagcttccatgtagagctggccgctttgagacagatacgcatcttcatcaaagtactttgtcgcaaagagttctgttgtaccttcaggtgcgcttccagtcaaaatcggcggatccacttttacgaagccttcgttattaaagaattcgtaagtcgcgcgaatgatttcattacggattttcatgatcgcatgctggcgctttgaacgcagccataaatgtctgtgatccatcaaaaattccgttccgtgttcttttggtgtaattggataatcggtcgcttcgtgaatgacttcaatatctgtcacagcaagttcatatccaagcggagaacgctcgtcctctttgacaatcccttttatatagagcgacgtttcctgcgtcactgatttagctgtttggaaaatgctttcttccacttccgcttttactacgacaccctgaataaaaccggtaccgtcccgaagctgtaaaaacgcaattttcccgcttgaacgcttattagcgacccaagctccgatcgttacttcctcacctacgtgcttgtacacttggttgattgttgttttcaacatatttccctccaaaacaagaaagacattcggaagctcattgccccgcgaactcttttatcatcactttattatacccgctcttaactaaccgggtcaatgcagataaaaagcggcttttctgtcagccgctttttgatctgttagctatgtttttctacaaaacgcttgattctttcaatggctttttcaagaagatctaacgatgttgcataagaaagacggacattctcaggagagccaaatccggatcctggaacaatcgcaactttttcctcctcgagaagcgctttaacaaattcatctacatctttgaaaccgcaagattgagctgcctcttttgcatttgggaacaagtaaaaagcaccttccggcttcacacagctgaaccctgggatttctatgagctttgcatagatcgtatttaatctatgttcaaatgcttctctcatttcttccaatggctcagaaggcccgttataagcagcaatcgctccgtattgtgcgattgatgtcgggtttgacgtgctgtggcttgcaaggttcgtcatcgctttaataatgtcttcagagcctgccgcataaccgattctccagcctgtcatgctgtgggacttcgatacgccgtttataatgaccgtttgctctttcagtctgtctgacagctgtgcaatggaaacatgtttctttccgccgtatgtaagtttttcataaatttcatctgacacaatcaagatatcatgttcaaggcacacttcaccgagcgcagacagttcttcttccgtatacatgacaccagtcgggttgcttggagagttaataacgattgcttttgttttttccgtaattgcatttttcagctgctcaggcgaaattttgaagtgattttcctcaagcccttctacataaacaggctttccgccagcgagtttcacctgctccggatagcttacccagtaaggcgttggaataataacttcatcttcttcatccaaaatcacttggaaaagggtatacagagcatgtttggcaccagtgcagacaataatttgagacggtttgtattcaatattctggtcgcgtttaaatttctctgcaatgctgtttttcagttcagccaaaccaccggaaggcgtgtatttcgtatggccctcgttcatcgaacgcacagcggcatcaataatatgctgcggtgtattgaagtcaggttcgcctgctcctaagccgatgacatcatggcctgcggctttcagttctttcgctttcgctgtgattgccagtgtggttgatggtgttaatgcggatactcttcttgccagtttcaacttgaactccccctaattcgtcttaaggcgtgatatttttgagaatctttccagttgtaaagtccacataacttaaactgtattgcccttctttgtctaagtacgtcacttcccaaagcaggacgtttccttctcttgccagatgaacctctttttgctttgaaaccagcccttcatcctttatgattttcgccgctttgtcttcagagattccctctttcgcttcttttgagagaatttttgcttttttatcagcaggaacccagacatataatgcagtgccttttttatccgttccctttacaacataatatttttcttttccgacaaatgtttcgacttgatcaacattggcgagatcggtttcttttttagcttcagcagctgctgcttcgtgcccctcttccttttgtgccatggctgatttataaatgcttgccgagacaagaagtactgctaaaaaaataataccaaaaatgacggtaaatattaatgctttttttctcatcttctcacctacgtacgataaatggtaaaaacggcttggtttttgttttcttcatccagtgcaaggccgaacatcagattttctcttttcagtgtacgattcaatgtgtccacaattttatacagatcatcagaatgctctacattaattgttgaaagaatttcgattttactttccattttttcatcctccagtttgaacaaatattgtaagtcatactccatttcaggacacgccatactagtatcacagagcgggaaatccgcttttaaataaaacaccatcctactcccacaccgcaaaagccgctttatgcggcttttattctttttcccctgcaacataagcttcaagctcgctgtcagtcatttcggatactgaggttgtcggcaaggcatcaagaaacagccggccgtaaccagcggttttaatccgtctgtccaatataataatcgttcccttgtctcccgcagaacgcagcaagcgtccgattccttgcctgaaggtcagcacagcttccggtaatgacactgtttgaaacggattctttccttttttgcgggcaagctcacattttgcagcatgaagcgggtgatcaggggaccggaatgggagcctcacgatcattactgtcgtcagctcatcaccagggaaatcaacgccttcccaaaaatgatttgttccgagcaggatcgcctgattggatgttttaaaagtcttcatcagcttgccgggacttccgcctgtaatcccttgtgccaagagctgaatgccggaagcactcatgttatgcttaagctcctggtgaacctttttcagcatatcatgggatgtaaacagcacaagaattttaggctgtttttcctttgccatcagttcgatataacgggctgtatcctgtataaattcaggttgccctgtatcctgaattgatttcatttcctttggaatcatcacctgcatacgctcatcgtaagaaaagggtgactcaattctcattgtccgcgggaaaaagtcactcagtcccagtcgttcaatcataaattgaaaagaaccttcgactgtaagggttgcagatgtcagcaccacactatttttgcgcgcgaaaaactgatcagccagaagttcaccaggttcaagaggctgtgcgtaaatggccactgcatttttcgcaccctttgcatctatttcaatccaaaccgcttcatcatcatcagacccaaagaagagcttctgcaacgtctgacagtaatgctgcaagcctttcatgcttctttggtattcatcggctaaaaagacggttttgctcttcatacccttcaaatgtttttccatcagggatgactgcgcctcaaaaagctgctgcaaatttgtcagcatggaacaaagcctctccgcaccatccgttaagatcgaccagcttttatcctggctttctttgttcaccttaaacactagacggtttaagtcttctttaggttttcttcgtttgacaaaagaatgtacagagctgaagaaagcatcactttctgcttgaacgtgctgaagccactcttccaattcgaaaaatgaatcaaccggcaggctgtttcgctggaatagctgtctcatcttttttagaagtccctgctccttcagagtgccgattctgctcaatttcgtatgcaattctatgtacgtggctcttttccctaaatgttcgcttgccgcacgttcaaaatggtgtgcttcatcaataataaatgtcccgctttcgggaagcctttttttctggctgccttcatcggtcagcaaaagggaatgattggtgattaccaaatcggagcgcatagcaatctgtttggcccgctcgtaaaaaccgatcacatgctcactgcgacttcttttataggagtcatcgtcataagccaatctgtcccacagcaattttccgcctgaaggcaaattcagttccgctacatctcctgtatttgtctctgtcagccaaacaagaagctgtgcctttgtcagtacggcatcataattatcatcttcttcatgaagcacctgctcaaatttatacaggcataaataatgcgattgcccttttaaaatcgccgctgttaccggaaatggaaacagatcttggacaatcggcaaatcctttgtgagaatctgctgctgtaaaagcgtcgaatacgtgctgattatgaccggcttttttgatttcttggcaaaaagcgcagccggaataagatagccaatcgtttttccgatgcctggaggagcttcaatcagcgcatgctcacgattggcaaacgcatcagccacctctctcatcatcatcatttggccgtctcttttttcatacccaggcattaactctgacagcgctttttcatttcccgcttcccagctttcgatctcaaatgagaagttctcgtcctcatttatacgaacatcgatagcttcaggttctctgacagaaaacgaagaaaagcgcgtatagcccggtatctcggtatgtctgttttcattaatgaacatatccaacaaatgcgtcagatcactgatgaaatgctgcgaaagccttcttaactgctttaatgtcggataaggaagctgccgcagcttttcaaggatttccaaaaaaataagccctgtcacttcagcatcgctgtcagcccggtgcggctgatcatgccgcagctgaagctcctcgcttaattccgtcagcttatacccttcaaatcccggaaaaacaatgcgtgagagctcgacagtatcaagcacttcacaatctgggagctgaaagcccgccttatgtagctcatacttgacaaatccaaggtcaaaatggatattgtgggcgacaaaataagcgccgtcaagcaattggaatacttcttcagcaactgcttcaaatggctgttcattttctaccatttgattagagattccagtaagctgctcaataaaagcagggattgatttatttggattaatgtattttgaaaaccgctcagtaatttgtccattttcgattacaaccgctgcgatttgtatgattttatcgcctttcttcggcgaattccctgttgtctctacatctataacaacgaaccgttgcttattcattaaaatggacacctcaattcttgcatacgacaaaagtgtaacacgttttgtacggaaatggagcggcaaaaccgttttactctcaaaatcttaaaagaaaacccccgataaagggggcttttcttctacaaaattgtacgggcgggttcgtttcccagcatttgttcaattttgttttgatcattcagaacagccactttcggctcgtggcttgccgcttcttgatcagacatcattttgtaagaaataataatgaccttatctccttcctgcacaaggcgtgcggctgcaccgtttaagcatatgacaccgcttccccgtttaccaggaataatatacgtttcaagacgtgctccattattattattcacaatttgtactttttcattaggaagcattcccacagcatcaatgagatcttcatcaattgtaatgcttcccacatagttcaggtttgcttccgtaacagttgccctgtgaagtttgccgctcatcattgttcgatacatattatattctctccatttctcgaatatcaataatgatgttatctattaaacgcgcttttgaaaaagcaactgcaacagcgagaatcatctttccagcaatttcattcacaggctcgagttccggataggaataaagctctacatagtctatggttccgctagtcgtttcaatgatttcttttgcagcttttatcaccgcttcaggatctctttcaccggcttggatcagttccgcacttgtttgaagggcccgatacagcttaggcgcttcttttctttcctcagctgttaagtatacattgcgagagcttttggctaagccgtcttcctctctgaccgtatcgacaggaaccaattcaatatccatgaagaagtcactgattaacccatcaacaacagctacctgctgcgcatcttttaaaccgaaataggcacgagtcggcttgactagattgaaaagcttcgtcagtacgatcgcgaccccgtcaaaatgtccttctcttgagcgcccgcataacacgtctgtgcgtctttctacatgaatcgtgacattcttttcaccgggatacatatccttagtatctggcgtaaaaagaatatcaactccggcgttttctgcaagagctgcatcccgctcaatatcgcgcggatatgcttcaaaatcttcattagggccgaattgtgcaggattcacaaaaatactcataataacggcgtcgttttcttgtcttgctttgtctgctaaggttaaatgcccctcatgcagaaaccccatcgtcggaacaaatccgattgacttgccctctgaatggtattgttttatggcttctttcagctgtgtaatatcagtaatctgtctcatcttattttcccccgtacaagccgtcaagcactgtctggttcatttgaaaggaatgcttttgttcagggaaagcacgatgtcttacatcctgaacatatccgctgattgctgtttcgatggtttcatcaatgcgcgtatattgctttacaaatttaggtgttctctcaacaccgtggccgataatatcatgataaacgagaacttgtccgtctgctttcacaccagccccgattccaatgaccggtatgcttagcgtctcggcaattttggctgtgagttctgccggcacacattccagcacaagcatcatagctcctgcttcttcgcattttatactgtcttctattaattttttggcgctttgttcgtctttgccctgtactttatagccgcccagtacgccgactgactgcggtgtcaaacctaagtgactgactactggaatgcctccaagcgttaatgcgcgaatggattcaaacacgccttctccgccctcaagcttcagtgcgtcagctccgctttcctgaacgatagccgctgcatttttcagcgtatcttccttggacaggtgataagacataaacggcatatctgtcacaataaaggtattcggcgcaccccttttaacggcttttgtatgatggatcatgtccgcaactgtcacaccgacagttgaatcaaggccgaggacgaccattccgagtgaatcaccgactaaaatcatgtcaactcccgcttgttcagcaagtttagctgccggataatcataagcggtcagcatgacaatcggttcttcagactccttcatttttagaaaatccagttttgttttcatgttttctcctcctcatgtttagaggagatgatctgccgttttcttctgcaagccaaaaaaccttccgttacaacgagaaggattcttcactttctaaagttcggcgagtttcatccctctgtcccagtccttttttggatcaaggcagactgctgcaatgtctatctattttaacaataggtgcagttcgcaggcgatactgcccaatggaagtataccaaaatcaacgggcttgtaccaacacattagcccaattcgatatcggcagagtagatttttttaatgccttcgttcgtttctaaaagcagaacgccttcatcatctatacctaacgccttaccgtaaaaggttccgtttaacgttctggctctcatattagtgctaataccgagcgcatagctttcccataaaagcttaatcggcgtaaatccgtgcgtcatataatcccggtaccgtttctcaaagcatagtaaaatatgctggatgacgccggcccgatcaattttttccccagcagcttggcagaggcttgtcgcgatgtccttcaattcatctggaaaatcattaggctgctggttaacgttaatgccgatcccaatgatcactgaacgtacgcgatcttcttcagcctgcatttccgttaggatgccaactgttttttttccgttaatcaaaatatcatttggccatttaatatccgtttggatgcctgctgcctcttctattccctgcacaacagctactgcagcaagaagagtcagctgcggtgttttttggagcggaatgtcaggccgcaaaatcaggctcatccaaacgccgtttccttcttgagaatgccataccctagacatccggccccttccggctgtttgtttgtcagccaccacgagggtgccttccggtgcgttattattcgcgagctcatgagccgttttttgcgtgcttgaaagaacgtcatggtaaataagatgctggcccatcacttccgtttttaatccaaaacgaatttcgctttcactgagttttccgggttttttgatgagccgatatccttttcttctaacggcttctacttcataaccctctttccgaagctcttcaatatgcttccacacagcagttcttgaacagccgagagcatcactgattttttggccggaaataaattcattgccggcctgagaaaataattcaataaggtcttttcttaatgttgaccgcatgtcttcagccactcctctatgtgtttcttttgattggagagcttccctgtcacaacagcctgctcgatccgctgtaattcttccgacacccattttccagccggccggtttcgaagcgcaagcaagtccttacccgtgatatcaagatccttaaggcttttgatcggcaggttttgataagcgtactgaatgtccttcagtttcttttcatccagtttttcgttttgccgaagctgcgatactttggccgctgagagcagtgctttttccccagctctgtacattgtcattgcgtcaaggctctggccaaacgtatcggcaatgtgaatggcttccttaatcacttttcccgggagcttccaacctttcaggaaaaggggcgcgtctttcaagactatgccaaggttaattaaaagagcagcccaaagctcctcacgggatgttaaagagaagaatggaaactcactcgttgaaatcaggttttctcgtttatgataaaaaccaggaagctcttcatacaatctcgtttgaatgagtgtttgaagcgcctggcgagaagctcttccctgcagcaatttctcgaactctatagtttttcgttcgactgaaacatgggagaggagtgatttttctttcgcaatggcttcttctgtttccggtgaaagcgtaaagccaagctggctcataaagcgtacggctctcagcatacgaagcgcatcctcttgaaatctatcctcaggctttccaacggttcgaatcactttctgatcaatatctttcttgccgccaaaataatcaagcaccttcccgtccgctgtcatggccatcgcattgatcgttaaatctctgcgttttagatcctcttctaatgatgagataaattgcacttctgacggtcttctgaaatcaacataatcagattcagtccggaatgtcgtgacttcataggtttcatcctcccagagcacaataatggtcccgtgctctttgcctacatcaacagtccgctgaaacagccgttctacttgatcaggtgccgcatctgtcgcgatatcgacatctccgatcgttcgtttcatatagctgtcacgaactgcgcctccgacaaaataagcctgatggcctgcttcgattaagatgcggagcacgggaagtgctttgataaaaactttttccatgtgatcactccggttctgctaaatcggcataaatctgttcatactggctgacaatttttttagaagaaaattcattttcaagcatctctattgccgcctttgtaaaacgattgcttagctgttcatcttctaaaatgctcatcgcgcgggctgttgcggccgtaacatcaccgacatccaccaaaaatccgctcacattgttttttataacctcagggataccgccaatgtttgttccaatacaaggcactccgcaagccatcgcttcaagcaggacaaggccaaagctttctttttcagatagcagcagcttcaaatcgctaatagaataaagctcttcaacacggtcttgatttccaagcattaagacttggtcttccaagccatattttctgataagctcgcaggctgtcgatttctccggaccgtctccgactaaaagcagcttcgctttcgttttgccagcgatattgcggaacacacggatgacatcctgcacgcgtttaacttttctgaagttggacacatggatgacgactttttcatctggtaaaattccatgtttctctttaattgccgctgtgtttttcttcagatacacgcgctcgtctataaagttataaatcgtttcaatttttttctccggtttaattaaatcgtacgtttcagccgcaagcgctgaggagacggccgtcaccctgtctgatgactcaatagcaaaacggatcagatcttttagagacggatcataacctaacaccgtgatatccgtgccatgcaaagtggtaacaatgccgatattgcgtttcagcatttgttttgcaagataggcgcaaacggcatgcgggagagcatagtgagcatggataatgtctaaattctcccgttccgccacctcagcgattttgcttgccaatgtcaaatcatacggaggatacttaaaaacagcatattgattaacctcaacttcatgaaaatgaatattgggatgatatgtattcagtctaaacggaatgcttgatgtgatgaaatggatttcatgtcccttttcagcaagctgcttccccagttctgtcgcaatgatacctgagcctccaacgctcggatagcatgtgattcctatttttagttttctcattgttcgcccccaagcacatcatgatcaagcatcagcatccgtttggaaaagaaaccttcggcatactccacgcccgcttctttaccgtaaagcttttctctcgcttcaacgatttcaatatacccattcgtcagaggagtagaaacggaatcctttgacgggataaactggcttttgtaggcgttgaggctttgtttctttgcctctattgtatccgagatatcaataacaaaatccggctgatgaaaaccatttatcatataatagtaaaccttgctgactttatgcgccggaaggcttttttcgtctttatatttatggattccggcggaaaagatcgcttcttccaccagtgcagccgcattggcgtgatccggatggcgatcctttttatacggcataaaaaccgcttttggccgacagattctgatgacagtgacaattgaccgaattgcctgatcactcattattaggccgcggtctggaagcgttagctgaattcttttatctgcgcctaatatgcgggctgcttcagctgcttcttctttacgcaaactgaccgtaccgttagaagagagttccgcttctgtcaaatcgcatatcattacttttttttcctgtttgacaaacttcgctattgtgccgcccattccgatctcgacatcatcactgtgggcgccaaaagcaagaacgtcagcattatacattcggctcttctccccgaagaaggtcacggaattcgaaaacaccttcatcaagtgtgcgcacaagaatttccgcagtacccatatttgtggcgagcggaatggaatacacatcacataaacggattaatgccgagacatccggttcatgcggctgcgcggtcagcgggtcgcgcaaaaaaatgacaagatcgagtgcattggcagcgatcagtgcaccgatttgctggtctccccctaaagggccggattgaaaacgttcaatttgaagacctgtcgcctcatgaattttcaaccctgtggttccggttgcgtatagatcatgattctttaaaatatcccgataggcagtcgtaaattgaaccatatcctgttttttcttgtcatgcgcgatcaaagcaattttcattgtttatccccccgtctaatcaatgatattttctaaaccatacacaagctgatcaatcttcatgacttgttcgactgacagtttaacgcctgacatgaaagaagcacggttataagaatcatggcgtatctgaagcgtttggccatccatgccgaacatgacctcctgatgcgcgatcagtcccggaagacggacgctgtgcaagcgaataccgttttgctccgctcctcttgctcctgggagaatttctttttcatccggatgtccttgctgcttttctttacggacttctgaaatcatttccgctgttttaagcgcagttccgcttggtgcgtcaagcttctggtcatgatgaagctcaataatctcaacatcctcaaaatagttggcagccatttttgaaaatttcatcatcagtatcgcaccgagcgcaaaatttggcgcgatgatggctccgatccctttttcttctgttaaagatgtgagctcttttaaatcagcttctgagaaaccggttgttccgacaactggacggactccgtgctctaatgcaatttttgtatgtacttttccgatttcgggcgttgttaaatcaatcaagacatccggttgtgtttctgtaaaacaggcatggatatctgtataaatgaaagcatctgactcaacaggcatcacatcagataatttttgctgatcgtatgtatggtctatggccccgacaaggtcaaaatgaggtgttcgttctgccaatttaacagcttcctgccccattcttccacgcggtcccgcaatgactactttaattgtttcgtttgacatctcgatctcctctactttccttcttcttttctggtccagcgatctttatctcttgtattaaatttatgcatgactcggtcgtgggcttcctctaaagagatatcaagggagttggctaaacaaaccaatacaaatagcacatcgcccatttcctcttccatgcttttatcatcttcagtcgctttttttggtttttctccataacggtgattcacttctctggcaagctcgcccagttcttcagtcagcctcgccatcatggccagcgggctgaaatatccttctttaaattggccgatgtaacagtctacttcagcctgtatgtctttcattgttttatcactcactgaacgaaacctcctatcatcctcttacatgttagctaattcagatacgtttgacaaatgtttaagcacgtttgctgttttctttttcatccactataatataaacgctatctaatggaaggaaaaggggttttatgtgatgcttggagaaattagattaaaaaacatattttttattttaatcggagcggcaattttttcatttggcttggttcatttcaatatgcagaacaatctggctgagggcggttttacaggtattacacttttgctttatgcccttttccacatcagcccctctatatcgaacctggtgttgaacattccgattttttttattggctggcgtttgctcggcaggacaatgtttgtttatacccttgtcggcactgtagccttgtctttgttcctcagcatctttcagcgatatgaaatccatatgccccttcagcacgacttagcgctcgccgctttatttgccggcgtattcatcggagccggcctgggaattatttttaagttcggcggtacgacaggcggtgttgatatcatcgcacgtttagtgaataagtattttgggatcccgatgggcagaacgatgtttgctttcgatgcctgcgtcatcattttgtctttgcttacttatctctcctataaagaagcgatgtatacgctggtagctgtatttgtagcggcaagattaatcgattttattcaggaaggcggatacgctgctaaaggcgctacgatcatctcttcgaaaaacgacctgattcagaaaaagattcttgaagaaatggaacggggcgtcaccattttgaaaggacaaggctcctacacaaaagaggatatagatgtactttattgtgtggtgccgaaaaacgaattggtgatgctgaaaagcgtgattaactccattgatccccatgcctttgtagcggtaagcgatgttcacgatgtgctcggagaaggatttacgcttgatgaaaataaaaatccgcttccgcgctgacatgtaatagaaaaaaggcggctgaccgccgcccctcacccttatttagggtagtccctttttttcagcttgtttttttccgccttgtactttctgtaaccgacataggtaagagcagtaatgatgatactgccggttgtaatcatcacccagagtaaagacggatcggcatcatcctcctccaccctgtcaaacacatttttcaggtcatgctgaagaagggaaagccgttcaagcttcgtgctctctgtcatttgctgaaattcctcttgctcaataacatctatatgttttccgactgtttcaagctgatcctctgatacatcgattgtaagactggggtaaatcaagtcatataaactgataaattcattccatttttcatgaaagcttatgcttccattcttctggacatctcgcttcagctcagtaaaagcttccataatcggtttttccagtgagccccaaagcgggtcagaccgattgtcaaccgcatccatcagcattctgaactgcgcggctgctctgagtttttgtgtgtctgatgtatcagcttgctttaaactccgaaccatatcattatagcccaatgtgatttgacgaatttgggctcccgttagcatggggtcttgctgttttttctcagcggattttaatgttttttcaaaatactccaagacttgaagcgcctcttcatatttcgcctgtcgggtcatttgaaagactgtatcggataaatcattcaattcctcgaggcttccccgctctgcagccttggcatttccattataaaaaataagtgcaatcaacaaacagatcgtcagctttcgtttcatgcaggtccctcccactctctctccttacagaatatgaagaaagggacaaggatagaccaacattgtctttacatcagctcaagcttcgtttgtttttttgagaccacaagaaagtaagcaagcgcgattgaaaagatgcttagccaaaatgttccgtatcctatttcagtcatataatcagaaagcatagagtattgcggcatcatatcaaacaagtagtcaatgacatcgttatgcagtgtccagactgcagcaattgcaagatgccaaaatgaaaaacgaaaatacggactgtataatacgccttgaactgccattgcaaaatgcgaagcaattagcatgtagccctcccacggcaagtcaccagttactgcaagcacaagaaaattcatagccaccgcccataggccatactttacgagggtaactagcgcaagcgcctcaaagaacggagcattccgtttcatgagaaaggcaagcagcacaaacagaaagaaaaacgttgctgtcggactgtccggaacaaaaatcaggaaacgtgccggtgtctccaaaagctgcggcaagtaccaatagtagccgtaaaccgttcccagaaaattaatggctaagacaagaataagcatcggccgctgccctaatacatattgaaaccatttcacatcgaatcaactctcagtctgtaaaaataatatgtccaaataaaaaagctgacgccgggtcagcttttgataataaaagtatatccttccatttgacaattcacaatacgttattttgcggttgtttcagaaataaattttgcaagttcttcgagctgcttatcatttcctttgaacacacccgccggcattttgcctttcccttctacagcgatttttttgatttcatccggtttcagcccgctgtcaaccaatgaaggcccggccgctcctccctgaaggttatccccatggcaagaaatacagccctgttccttaaaaaccttatatccttctgcattggtgtcaatgtcggcttcttttgtaattttcccctgttcttctgccttggcccagtcatgagtagcaactgactgccacgtcaaaaatacagcagcggaaatggccagaagcatcataccgacagcgaccggacgcttccacggccttctttctgtccctctgtctaggaatggagccaaaagcagggccccaaaagcgagacctggcataatcatggcgccgaccactgtaaagcttccggcggcgtattcatacttcaacagctggtataagaaaagaaaataccaatccggcagcggaatatacccagtatcagtcgggtccgccatccgctccaaaggcggctgatgcacaatcgtcaaaacgagaaaaccgatgagaaagacagctccaaccatccattcctttaacaagaaatttggccagaaagcctctgttttacccggatactccgaataatccttcggtatattcggctttttttcagccggtatccttgagtcgcctacaaatttcatccctttgccccggtgcatgtcatcccctcccttttattcgcagatcaagagtttaaagcggtcctgaaatcccctgcttccggatcataataaaatgtgcagccatcagcccgaacaatgcggcaggaagaaaaaatacatggatcgcaaaaaacctagtcagcgtttgggcgcctacaatatccggatgccctgcaaggagcgttttaacttgcgttccgatcaaaggcgtagcttcggcgatctgcagcccgacttttgttgcaaacagagccttcatatcccaaggaagcaagtagcctgtaaagccaagaccgagcataacaaaaaagatcagcacaccgacaatccagttcagctcgcgcggttttttatacgcgccttggaaaaagaccctcagcgtatgtaaaaacatcatcacaatgaccaggctcgcaccccagtggtgcatccccctgacaatctggccgaatgccacttcattttgcaaataatataccgattcccaggcatttttgatatcaggcacataatacatcgttaaaaacattccagataatacttggataacggttacaaaaaacgtcagtcccccaaagcaatacacaaacgcagagaaatgatgggcgggattcacatgttccggtacttcgtgatcggcaatatccctccacatcggtgtaatatcaagccgctcgtctacccagtcataaattttgttcagcatgtcacccttcccccttaggctttgcttttccaagatacaggaagccgtcttttacttcttgctcataatgatcaagaggcgcaagcggcggcgtgccagggacattggtgccgtccttttcatagagtccgtaatggcatggacaaaagaatttattcgggtttttaggatcactattccagttcaccgtacaccctaaatgtttacaaattggcgaaagtgctacaatttcatccccgtttttgaagacccaggctgatcttgactcttctgactcataccaggcatcgacttgattaattttaaaatcaaagcgctgcggctcttttgtcaactcatcaacgctgacaacctgaaccatatcctgcttccctgtcgattttaataccgggtcgagtgcgaagcgaaccataggcatgagcatactagccgccataaaacctcctacacctgtgagcgtgtaattcaaaaattgacgtctggatatatcatgttttccgcccatctcttctcccccctctaggtcacccctgcaaactgactaaaatagaaaatattgcaataactctagacaccctcataatatatgaatctctcagcaaggtcaatatagccaaaatattgtttataaggaaatgtaagtgtttttatgaagtgctccataactgtaacaaaacgttcaaaatttcagcagtgcgttcatccaatatttttcttattaaagagtcatttaaatgctctaatggaacagacggtgtaacaatgattttgcctaacgcatcctcagctctccaactttcgtcagatgtgagcaggacaacatgcggaaattccgttatcagctcttcccgcaaatccttaagcccttgaacggttatttcatttctatcaacatatgtataaggcggaagtaaatatacccgtccctttaactgcctttcaagttcttctgagagaagctgcgtaaactcgcctttctccgccgccattttaaaatggttattaacccttatgttaattaatggtatgacagcggtatcaatgtaatccttagcttgtaaatagtccttggcatcagtgattctccacctcatcgttctccccctttacggcaacaagccttgcaattcactgcaaggctggtcatattatgtgagctgatttaattggcgcgataattgttcaaatgcctctttatcatgacgatctaacgcctcgtcaatgtcttttaataatttttctctttggaatgtggaaatagcgtgctctaaaatctgttccgccaatccctgatcttttttattctcaaaaaggtttttcggaatatgcgggttggactccagcaccgccgcatattcaggtgagctgtaagccgaacggaaattaagctggataaacaaatcctgctgtttatttaatctaatatcatgaaaagatttttccgcgtcggtagtcatgacattctctttatagaaccggaacggaacttcttcaacacaatgtgttgacattataatgcctctcgggcaaaattcagcctgctccacaaaatgaaccttctccatgagagaatcatggctcattaagtagttcaagatccaaacgcactctcggcgctttaactgataatggtttaaaaaccaacggataaaatcttttttctcattgacagaaacaggggtctgcatgtaattccctcctctatcgttcgtataatctatatacttatatgttccacatgaatggttaatattcctgcttatctagaaaattcatcctcgattcgcaaaatcgtttcttcaagctcttcattggctccgtccatttcaagaacctttttcaaaagcggcagcgcttctttttgaagaccttcttctaataggaagcttgcgtattcatataagaaatctctatcctcccggtaatgaagataggcagcctcaaaggattgttttgcttcctcgtattgctctaattcagtatatgcgcttgcaagataccaattgtatttaggatcttcttcaccgtagcttcgaacctcttgaataagatcaatgatctgatcataatcctcttctttgtgatacacggcaagaagtgtatgaagcgcctcgacaaagcccggatcaagcgcaagcgcctcctgaagcagcttcttcccctcttctgacttcccgattttcaaggccattttggcggcataaaggaaaagttctttgttatattcatcatatctgatcccctcttttgccgtttttaatgcctcttcatacattccttcagcttcatagcttttcgagagcggcatataaagtgaagtataagatggatcaagctcctttaaatcagacagctgcttaatagctgttttcacaagccccgcctgtaaggctgtaaaaccatagccgaaaatcgtattaggatcaggattctcatcgacagctttctcataccatggaatggcatcctcaaattcacctgaggcacttaacgattctgccagtctttgatggacattaacgcccccgatctcactctgctcctcagccgttgttttaaaatattgaaccgcttttgcataggctccctgagcaaagtaaagttctcccagtgcaaaatcaataacaggttcattgtccagaatggactttgcctggaaaagcttttgttcactgacttcgaataacccctgcatctgataaagatccgccataagcagcaaactttccggatatgatggatctgtttccggaatagtctccagcacagcgagggctttttcttcttcgtcaatatctattaaaagttcagcgtagaaattcgtcagttctgtttcatttggatataaatcatgtagatcactaatcagtgaaatggctttttctacatcgccccactcgtaataaagctgggctgcaatggctttatcttcatcatgcagctgtttttcagccttcgagagcgtgttgaggcctttttctgtttcacctgcttcaactaattttatggcttcttgaatcaatgtattcaaatcggaccggtcctttcttttcctatacaacatcaaccatacaaaaaagctttatttgttcgggttaatcttatcataattcagacgaatgcccccggcaaataagatgcttctgtacggaagggaattattgagtcttattagtttaccaaaagatcttgagatagaaaatgaaaaaaggaagatcgccctctgtacagtaaagcagctctttgacctgccggcttgtaagtaaagcacatcccccttttcgtttttctatcccctctataagacaagctatgttttttcgcctcgaattatgatctgcataaaaaatcctgaagtaaaacttcaggattttttcgaaagcttatttaaatgctcgaagaaggttggataagaaacgtgaatggcatccgtgtgctcgatttcaatcggctcctccgttatacaggaagcaataccaagcatcattccgattcgatgatctccgtggctggacactgccgcgccgcctttcaacgtttgtttgccataaaccttcattccatctgctgtcggttcaatttcagcacccagcttgcgaagctcagaaacaacagtatcaatacggtttgtttctttcacttttagctctgccgcgtccttgataacggtagttccttcagcctgagtcgcaagaagcgcgatgatagggatctcatcaattaaacgcggaatgatatctcctccgatttcaactgcctttagagatgacgtttctataatcaaatctccataaggctctgcaccgctatcagcagatggtttgatttcaagttttgcccccatgttttgaaggacatcaataatacctgtccgagtcggatttaaacctacgtttttcaatacaattctgctgtttggaaccatcgcgccagcagcaaggaaaaacgcggctgaagaaatgtctccaggaacaaaaatatcagcagctgtcagtttctggccaccagcaatggaaacactcgtttgatcttcagaaagcttaacgccaaaagcagaaagcatccgctcagtgtggtcccgagatttatggggctctgttacagttgttgtgccctcagcctgtaatccggccagcaaaacagcagatttaatttgcgcgcttgcaacaggtgatacataatcaattccttttaatgaagcgccgctcactgacagcggtgtaaactctccgccggctctgccgtcgattttagcccccatttttttcaaaggctcagtcacacgcttcattgggcgcttcgcaatgctctcatctccggctaccgcgctgtaaaaaggacggcccgccaatattccgagcatcaggcgaatggttgtacctgaatttccgacatctaaaaggctttctggctctttcagggcatcgattccttttccgtgaatcacgacatcgctgctgctttgctcaatgtgaacacccatttttctaaagcaatcgatcgtgctcagacaatctgctcccggcagaaagtttttaactgttgttgtgcctgccgctagcgcgccaaacataacagagcggtgagaaatggatttatcaccgggaatatgtatttctccatgtaaggtctgcaccttttctcgtttcattttttccacctcaatcagcataaaaagtttcatattccgcccgggcttcaatgcattgttctgcccttttgcggtcgtcatcagactgaaaactgatccttaaaatcccgttaatatcctctcgtgtttcgataatgcggatattcgtgatactgatgcgctccgcagctaagatcgctgttatctcggatattacacccggatgatcgggtacatccacatataaatcataaaatgcaggtatcgctcccttctgccgaagcggcagcccgtcgcgataatccttggcggttttaaaataacgaaatagattttccgcatcttcttgttctacatatgtacggatcttgtcaatttcacgaatccactcatcaaaacggtctaagattttatctttattatgtaataaaatatcccgccacattgccgggctgcttgatgcaatccttgtaatatctctgaatccgccggcagcaaaacgcttaacaagcggatacaggttttccgaatgatgggtttggtgaacaagactagctgctacaatatgcggaaaatgactgattacacttgtaacgccatcatgctcctccggcgacatttccacaaaatgggcattcgtacccttcagcagattttttaactgttccacagcttgtttgtctgttttctggcctggggttaaaatataaaatgcattttcaaacaggaactccttcgcagcggccactcctgatttatgtgaacccgccatcggatgccctccgacaaattgatagcggctaggcagcacttgatcagcgtaatcaaccactttttgctttgtgcttcctacatccgtaatcaaaagctcatgttcaattcctgaatgagccagcgcttcaagcataaccagtgtttgttcaacaggtgtcgcaatgattactgtagctgcctctttcgcaccgctaataaacgaatcagcacgatcgtctatcacgcctaattttaatgccgctaccgcctgttcatcagagatatcgattccgataatccgtttgccgggatgattttttttgatggctagggctatcgaaccgcctatcaatccgagaccggcgagcaatattgtatctttcatttgattcatacgtcatcacctggtttatagactaaagaggtgatattcgatcacctcttataaaatttcagctaaaatggcaagtatttcttcattttgctcttttgttccgatcgtaatccggagtgatgtcgggaaacctaatgcatttcctgaccggacgatatagcctttttccagcagagcctgaaacagttcatcagcaggacgtttaaagtcaattaacacaaaatttgtctgtgaagggtagcactttaaaccatgagttttcgcaaaatcataatactgctgaaggcctgcattattttgctcgacacaggaagcaataaacacttgatcatcaagtgcggcaatcgccgcagcctggcccagacggctcgtattaaacggctctctcgccggctcaatctggcgaatcaggttctcgtcagcaattccgtatccgactctgagcgctgccagaccgtatgcctttgaaaatgtgcgcaaaatcatcaaattggaatacttgcttaagagcggcacggtttccgggtaatcctctgctgttacatattcataatatgcttcgtcaagaacaacaaggacacgtgaaggaacgcgctccagaaatgcgagtaattctccttcagatgtataagtgccagtcggattattcgggctgcatatccaaacgacttgtgtctgttcgtcgatggcttctaacatggcgtctaaatcatgtgagccgtcgggacgaagtgcaatttcacgcacttcagcaccttcaataaccgcattatgtttatattgcggaaaagtcggggcagcagtgatcgtattggttttattgtttagaaatgcccggcagatgatctgaatgatttcatcagaaccgttgccgaaaataagtgatgtttcgctgacattgaggtgcttactgagccttgtccgcaaagcggcgctatacccgtccgggtaaagggctagctgttgaatctcatgatgaagcgcctcttttgcagcctctgaacagccgtaaggattctcgtttgaagcaagcttcacaactttatccaagccatattctgatttcactgcttcaatcggctttccaggctgataaggcttcagctgttttaaatgttctttgatacgcaaatcagtcacctcattttaaactgtacaagccgctaaacgccattgcataatcctcaaactcctgcagcgcctgatttctcgtttcagcgctgatgagccggtcctttaattcttctatttttctgacgagcgcacttcccactacgacaccgtcactaatttcattcatctttatgacctgttcacggtttgatataccgaaccctacagcgaccggaacagtgctgagattcttcactgtccgaatgaacgggtacacggatgaattgaactcattgcggacaccggtcacacccagagaagacacacagtagacgaagccctcggcttgttcaataatggttttcaaacggctttcgcttgtcggcgcaaccaaagaaatatacgtcacctcatggcttttacattcctcttgaaggctgttgctttcttctagtggcagatccggaacaagcagaccgtcaatatgattttcccgcagtaaagcgaaaaagtattctttgttcaattgtaacacaggattataatacgtaaagaggataatcggaatattcactccgttttttttcatttctccgcctaattcgattgcctttacgatattcattccttgatcaagtgcccgctttgaagcccgctggatcaccggaccgtctgcaagcgggtcagagtatgcaacaccaagctccaatgctgtggcgcctgctttttggagtgacttcgccagttcaatcgaaacctcaggaactggatcgcccaccgtaataaacgggataaacaatttttctgatggttgaagatcaaatttaaacatgggctttcacctcttcttccaatacattcattaatgtgttgacatccttgtctccccggcctgataaacagacgagaatgagttgaccgcgatccattcctttggcgagtttgaatgctttcgctaacgcatgggcagattcgattgccggcaaaatcccctctttttctgacaaaagctttaatgcatccaccgcttcttcatcagtgatactgtcataagtgacacggccgcttttatgcaagtatgcatgctccggaccgattccaggatagtcgagaccggctgaaatagagtagggctcaataatttgcccgaactcatcctgaatgagataagtcaatgaaccatgaataacccctacggttcctttcgaaatagtggcggcatgaagaggcgtatcaattccttttcctgctgcttcagcgccgatcagttcaacatcttcatttaaaaatgcctgaaacatacccatcgcattgcttcctccgcctacacatgccactactttatcaggcagagtgccttcaatacgtttcaactgatccttcgcttcctctccgatcattttttgaaattcacggaccacttgcggataaggatgcgggccgacaactgatccaatcatataaaagtgatcctcacaatgctgaacccagtaccggatcgcctcatttgtggcatccttcaatgttccgtttccgcttgttacaggcactacctccgctccaagaagcttcatgcggaaaacgttcagagactggcgggcaacatcctcttcacccataaacacagtacaggaaaagccgaatttggctgcaactgttgcagcggcaacaccatgctggccggcaccggtttcagcaatgattttcgttttgcccatttttttagcaagcagcgcttgacctagcgcattattgattttatgagaacctgtatggtttaaatcttctcgtttcaaatagattttcgcgccgcctaagtattcagtgactcgatcagcgtatgttaatgcagtcggccgtccggaatagtcctttaacagcttataatactcttcacgaaaagcggggtcatccttgatttgtttaaatgctgtttctatttcatctaacggctgcatgagtgtttccggaacaaactttcctccaaaatcaccgtatctgcctatttcattcggatatggatacatatcggttcatcctttcttctaaaagcctcatcagattctgatctttttgtccgtttttttcaattccgctggcaaggtcaattccttctggctgccatttcaataggctggtgatgctatccggattcacgccgccagcgataaagcagcgtttaccaatagccgcctgctgatattccggcacacattcccaagaaaatgcaacaccagttccgcctctagacccttttacagatgaatcaatcacaaagccgtcaacattatctttaaagcgggctatttcttgagttgtgttaccttgatggtgaagcgccttccatatttcacagcctgtcagcttgcgaagagcagcagcatccgccggtttttcatcaccgtgaagctgaatgacgtcgagcttcaagctcttggcaatacgtgacatcgtctctattgattcattaacaaaaacacctgcaacctgtttttcgacacgagcttggttcagccattttttcacatcttgcggagatacttttcgtttgctttcagcaaaaataaatcctaggtaatcagcctgtgattccgccgcaagctgcaaatcctttagtgaccgaataccgcaatattttaatgccggtttcttcacaacctcactccccaaacaaagcatggattgctttacgctgagaagtttgtctcatcaatgattcaccaataagtacagctcgcgccccatgttcattgacaaatgttaaatgttctaaagaaccgattccgctttcgctgacaagcaaggattctttcggaacgagagatgcgatttgttctgtctgctttacagatgtttcaaacgtttttaggtttcgattatttacgccgagaatgtcgggtgtgaacactttcaatatttgttctagcgttgatgcatcatgaacctccactaacacgtccatccccttttcacctgcttcaagatataattcatgaaggtgtaagggatcaagcacctcgccgattaacaatatggcatccgctccgattcttcttgattcctctacttgaagagaatcaataataaaatcttttctaagtacaggaatcgaaacagcacgctttacgtctgataaatagctgttttccccttgaaaaaacggggtgtctgttaaaacggaaatcgcatctgccttcgcagcctcatagtcttttgcaatctgcacaggcacaaaattctctttaataagcccttttgacggcgatgctttcttcacttcggcaatcaacccgataaaccgattcgggcttgccagcgcctccttaaatgaacgtttctcgaaaggctgctctaccggcaaaaccagtgttttcacttcttctttcttttgtttgatgattttttcaagcatagatctcttcctctttctgctttagtcgttcaagctgcgcggcagcgcctccgcttgtaatcgtctctaacgccagctccgttccttccttcagtgaggcggtaatccccgccgtgtaaatcgcagctcccgcattaaaagccgtaatagataaagcggaactgctgcttttattttcaaaaatattctgaatgagataggcgctctctttcggtgactgcacctgtaaatcttcaagtctgccatttgtgaaaccgaaatcttcgggtgaaacggtatattcccggcgctctccgtcctttaattcaatcacgtcggtcggtgctgtaattgaaagctcatctaaaccgtcacggcttgatacaaacatgacgtgcttcggctgaaacgtctccagtgcgcttgccatcagtccagctttttcaacagaatagaccccaatcacctgacgcttcgcctgtaaaggattgctgagcggcccaagcagattaaataccgttctgaaacctagctcttttctagtacctgctacatgtttcatagacgaatggtaaagcggcgcaaaaagaaatcccatgttgtttgtttcaatgctgcttttgaccttctcgggagtggtttgaatagaaacctctagctcctctaaaacatcagcgcttccgcttttagaagagacagagcgattgccatgcttagcgattttcgcgccagctgccgaggcaacaattgccgaggcagttgagatattaaaagtggaaataccgtctccccctgttccgcatgtatcaacaatatcaggaagtccatcgactgtaagagcgtgtgcccgcattgccttcacaaaacccgcaagctcttctggcgtctccccccgatgagcaagaatagacaatataccacccatttccgaaggagtcatttccgctgccatcatcatattcatcaacgtttcagcctcaccggcagtaaggttttttccgtcaacgcacaattgaagaaatttgttcatcagctttatcctccttgctatgaaacatgtcttctgcaatatgaatcgttttcagcagcgcaccggctttattacagctttcttcgtattcggcttctggaacagaatcagcaacaatgccagcacctgcctgtatcgatgcaacgccgttctttacactcatcgtgcgaatcgtaatacaagagtcgatattcccgtcaaacccaatgtaggcaatacaccctccgtatgtctctctcggtgttggctcgagctcttgcaaaagctgcatggcacggattttgggtgcgcctgttaaagtccccgccgggaaagcagacatcagtgcatcgacaggatgaaccccttttttcaatcggcctgtaaccaccgagataatgtgcatgacatgtgaaaaggagacaatttttgtgaactccggcacagaaacagaaccatactctgctactctgccgatatcgtttcgggcaagatcaacgagcatgtaatgctccgccttttctttttcatccttcatcagctcaaccttcagtctctcatcttcagctttgtctgcgccgcgttttctcgtaccggcaatcggatggatttctaagtgcccgtcttgaacgtgtattaaccgttccggagagctgccgactatttctctgtctagcagtttcatataatacatatacggcgaaggattgacgatcctaagcactcggtataactcaaaagcatctgcttttatcggcacctcaaatttttgtgataaaacaccctggaagatatctcctgcttttatatagcttttgattttttctacatcagccataaaagccgatttttcataattagaagataccgtctcaaagctgggtgtcttgtatgaatcagcagagagaaacagctcttttatttttttttggtccatcattttttcgatgagattttggagctccaaatgattttgatggaatacatccattttttcgttttctgtttcctctccagtgagccttgcatattggataaagtggacgtttttggtttcatgatcatacgcaattaatgtccggcaaacaaacagcatgcacttttccatgtctgtttcttttgtatgcgaaggaacagaaggctcaatcagcgggatcatatcatagcttaagtacccgacagctccgccgacaaaaggaatgccaagctgaggtgttttgattttgtatgtggtattcatccagttcagcacttcttttagttcatttcctgtgtaaagagatttgctgtcctgatcagcggccgaaaaacggccctgctcttctttaattgtgagaaatggatgcaggccgataaatgaatatctggaccaagtggatgtatcgtcctggctttcaagaagatacgtaatctccctgtcaagcttctctatcatttgaatgggtgtcagtgtatcgactgtgaaggtctccacaatcggtatcgtgtggtgggacaagctgtcctctaaaaatgcggaaatgtttgattggaaattcattactctcactccttatggcaaggagaatgagaagatggcatgagaggataaaatactatataacaaataaacccaaaagaaagacttcttttgggtagaataaacataatgtctcagctcaactaaactcattctctgctaccctattctctaactcaactcattctaattgctttatacacactcttgtgtatttctaagctgttcttatcgtattacaattcagtattttttgtcaatgataaatcgggcctcaatacgacggctttttctaaatatacatgtctgatctgatcctgagggacatctgtctggaccgtcatcatgactcttatgcactttttcagaccgcctgttacgtccatttcctgcatacatgttaccggtacatactgccatcctgaaagctcgcgaacagcttttgccgggaaaacagcgtgcaaatcaggtgtagccgacagaagcatttgaacaacatcttccggttttgtatgattttcttctatgattttctctaacagctgtttagttttttgtaaaatttcttcttcagtatcccgttcaactgtagttgctccgcgaattccgcgaatcatcatgatgtctcctccaatcgccatttgttcagccagctctcaagttcatttctggaaaatgtatgatcagcaactttccctaattcgttgagcacaataaactgaatcttcccgccacgggttttcttatcattcatcatacggtccaagagaaccgaagtttccgtctcttttctgatttgacttggataacccaggctttttagccagctgaccaaacgttttctgtccatttcacagcctacagtcttttcgcttatatataaagcaaactgcattccgagggctacggcatcaccgtgagtgatctgcccgtatccatattccgcctcaacggcatgaccgagcgtatgcccgaagtttaagtaagctcttatcccctcttctttttcatcctgctgaacgacagacgctttaattgaaatgcctttaaaaatcatgtcattcagctgatcattagtgatatcacgcagtgagtggatattcagcaactcctccagaaacgctctgtcatagataaaagcgtgtttaatcacttctgccattccggacctaagctctttttcaggcagagaacgcaggaaatctgtatcatagagcacggctttcggctgataaaacgcaccgattagattttttccaagcggatggttcacggctacttttcctccgactgcgctgtcatgcgccaagagcgtcgtaggcatttggatgaaatcaatgccgcgcataaaagtggcagccacaaaaccggcaagatcccctacaacaccgccaccgaatgcgatgatgcatgaggagcgatccaaatgaaaacgaatcgcttcactctgcaattttgtgtacatgtccatggattttgcctgctctccactcggtaccgtcacttttttcacaggccatttatcttgcagcaaatggagcatttcatcaccatacaggcggtccacttcttcatccgtgacaagcataatccttgttaaaggcctgtttaaagaggttaatagttcgcaagccttttttctgataccttgtccgataaaaacaggatatgacgaggaagcagtttgaacatgcagtgtcttcattaaaattccctcgacagttttctcatattctccacattttctctaatgcggtcaatttgatctaatccgaattgttcaacgactgcgttcgcaatttcccaagcgacagccgcttcagcgactacacttgccgcaggaacagcacagctgtctgaacgttcaatgctggcagaaaacggttctttcgtttcaatatcgacacttttcagcggtttatacaaagtcggaatcggcttcatgactccgcggacaacgattggcatccctgtcgtcatgccgccttccagtccgccaagtctgttagtagcacgggtgtatcctttttcctcgtcccaaatgatctcgtcatggacttcgcttccatttcggcctgccgcctcaaatccgatcccgaattccacacctttaaatgcattaattgacagtacagcggcagcaagcttgctatccagtttgcggtcataatggacatagctgcccacgcctaccggcattccctcgacaatgacttctactattccgccgatggaatctccgtttgcctttgcttcatcaatggcagccatcatttttttgcctgcctcttcatcgtagcatctgacaggagactcttccgttacgcgctgcaggtcttcaattgacgtatattctgttttttcagctttaacagcgccaatttgcaacacgtggcccgccaccttaatgccaagctcagaaagaatctttttagctacagcccctgccgccactctgacagttgtttcccttgctgaagaccgctcaagcacatttctcatatcacgatgattatatttaattgcaccgtttaagtcagcgtgcccaggtctaggtctggaaatctggcgcttcatttccttttcttcatcttctgtaattggagcggcgcccatgatttttgtccaatgcttccaatcgttattttcaactacgagagcaattggtgaaccgagtgtacgtgcatggcgcaccccgctcataattttggcctggtctttttcgatctgcatgcggcgaccgcggccgtgtcctttttggcgtctggcaagctcaaaattgatatcttcctccgttatgtaaagcccggcaggtacaccctcaataatggttgtcagttgggggccgtgtgattctccggctgttaaatatctcatgacttcttctcccttcatcacattaacgcttttaagtaagactactataacatatttttcagcaaaaagtcagtctatcttttttgataaaagaatgtatcggctgggactaggccaaatttctcgggattgaagatttgctcggtgctgccgacaaaaagaactccattcttcttcaagctatgtgccatttttaaatacagctcttccttcgcgctttctgtaaaataaataaatacattgcggcacacgattaagtcaaagtcttgttcataacgatccgccagcaaattgtgctttttgaatgtaatattctttttgatttccgttttcacttcataacttctatttgcgttttgcgtaaaataacgatctttcacagatagcggcacttcctgtaaagaccgctcctgataaacgccttttttggctttttccaaagctttttcatcaatatccgtcgccaaaatctgatagcccggaagacctttttgctggtccaaaagcatggcaagcgtgtatggctcctcacccgttgagcaggcggcactccaaatctttaaaggcctagaggtcttgattaacggcagaattgcagtctcaagaacttcccatcttttataattacgataaaattctgaaacattgatcgtcattctgtccaatgtttcatttaagagagcttgatccttttccaatgccgccgcaaagtccttaaagctttggaacccctttttctcataaagtgacgttagccttctcttcatttgtgcttctttatatagtgtcaaatcgactccggttaattgtttccattttgttgtaaatacgctgtatgtatccatctctactctcccagtctcgctgtctttttgtcctagtatagcttgttttatcaggaaattgtattgtttcaataaaaaaatcagcttttcagctgattttagatcgttgggaaaggcagaggtctgatgcacactgccaatcaaccctttattcactttaatgtaaacctttacaaaacagatcaaaaaccggcggcgttatatgttgccggctctgttgcttattttcacaatgattaatagatccagcctgccataagctgctgatatgatactaattcttcattcttaaagaaaatgttaatctcgcgttctgcactttcgagagaatcagagccgtggatgatgttttttccgacaaacatgccataatccccacgaatcgtaccaggtaaagcttctttagggtttgttttcccgatcagctgtctcgtcacttcaatgacattttcgccttcccacaccattgcgaatacaggtcctgaagtaataaactcaacgagctctccgaagaaaggcttaccttgatgttcggcgtagtgtttctcagccatttgttcagtcactctcattaacttggcgccagctaattgtaagcccttacgttcgaatctagataaaatgtccccaatgagctgacgttggacaccgtctggtttcaccatgataaaagtcttttccatcatattctccaccccatcattatgtatgtataggctttcacactgcacaccgaaatcgtaacatctttctgataattaatcaatccggggcggagaaatttcttaatatctacaaaaattaaaattttcttttaccgatatattttgcgatggctgcaagagacgagcgtgcgcgccctcgaggaagcgtgtttaatttctgaaaagctttctgcagatacatttcgcttactgccatagatgcttcaattgcatctgtttttttgatttcttcaatgattggttcaagctgttcctgcgttgtctcactgttaatcaatttaagctggttttttaatgcaggatttttcagggcatacagcactggcaatgtgacgtttccttgaagcaaatctcctcctacgggtttacccagctcttcctcagttgaagtaaaatcaagaatatcatcaataatctgataagacatgccgacgtaatacccaaaccagtacaatgccttatgaatcttctcatcagctccagacgcaatggcaccaagctggcagctgaccgcgatcaagagagctgtttttcttttgatacggcggagatacgttctgagattttgttccatgttgtatttgtctttgatctgctcaatttcccctagacaaacttcaacgatcgtctgtgacaaaatcctatgggctttcggttcgttaattctcgtcatcatttcaagagatcccgcaagcatataatcgcctgtgtacatcgcaatacgattgtcccactttgctttgattgtcggttttcctcggcgaagctctgcatcatcaatgacatcatcatgaaccaaagatgccatgtgaatcatttccagagtgacggcgacatatttaatcttattaatatcgtaatcgccaaacatgccagaaagcagcacgaaaacaggccgaatacgtttccctccggcctgcagcaggtgaagacctgcctcgcttaaaagcgggtaatcggaacgtacggtttgttcaagttctctttcgattacatcaatatcgtcatttaaaaaagagtaggccattttaaatttcatatcattcacccaaacatctgtgttttcatttccatccgatatgcgtggcagcgactccgccagtaaacgaatgatatttaacatttttcaggcccgcctcttcaaacaggcctgccagttccttcattccagggaaatctctggctgattcttgaagccaagaatattctttatagctcttcgcaaacagtttcccgaaaaacggcataatatacttaaagtacataaagtaagcctgtctgaatccgaacatttccggctgggacgtttccagacataccacctgcccacccggcttcactacacgtctcatctctttcagtacagtcaagtaatcagggacattgcggagtccgaagccaatggtgacataatcaaatgtatcatcatcaaaaggaagctccatcgcatttccgtgcagcagttcaatttggctgaatccgccgtcttttactttctgctcgccgacactcagcatattttcactgaaatccaagcccttgatctcgccgcttttgccggccgcttttgcaagagcgatcgtccagtcagccgttccgcagcagacatcaagtgctgttgcgccttcttttacattcatgatgcgcatcgttttgtcgcgccattttttatgctgctgaaaactgatgacagagttcatttggtcatagtttttatatattttttcaaatactccgtgtacgcgctgttcttttgagtcctgcataatggtttacccttcttccactttctgatgataggtttgatcttggctgattgtcttcagacggtttattaaaatgttctgaataggtgaatttagaggcagaagtgactcaatgctgtttttcgcttttttaaaacaatcttctaatatctcttcttttgtttttcccagctgtataaaactcccgatcacatccagaaatgcatcatttccgttcataagccgcttaaatacaaaaaaatcactcgacagctttttccagcgcggaaggttgaagtgttccgccacacgatggaataaagctgattcaacgatgccgacactttcgaaaaaatcgttttcgtccttgaaagaacggtcatacagacgaattttatgttcgttgatttctttaatggctgtagcaagcgtccgaatcatgtagatatccttcatttcagatagtaaagagtagtacagcccgctgaaataatcgcccgcgagaacagtcaattggcggtttttgttttcgtctcgttttatgactctagctgtcgtcacttcatcatgggtatcaagggcgctttgtacaagcatcgctgttacaatataattttctctgtcgttgttttttatgtcagcttcttcaaataaagcatgaaaaagaagaagcttatcctcatcaattttcggcgcggaaatatgcttcgctaaataaggatgagacagcttttgttttaatttcttgttcagattggctaaagttccgtagatgtcttgcaaaaatatcacccttgtccccaaattcacatttatttcttaatctatgtatgagttttatcttttcattcgcttacgcaggtatcattatagcataaaaaaaagaaattggctgtatcctcccgctgtttgcgagcatttgcttttaacagcggggacagccagcttattttttttcgcttttcatttctccgtacgcggtttgaatcagtgcctctcctctgactttaatggcagaagtatgctctgtaaactgagcgatgatcacttctcccttgtcgagtttttcggaatggtgaaactttgtgtctgttcctcttgtcaggccgatcacattcactccgtcctcaacggctttaatgacgacaaaatcacttgaatgcttttggttcatttatagcaccctctatctttattagtcctggcgtttaatatgttccaatacttctgcacgggcagcggcatcatctttaaaaacgcctctgactgctgaagtcacagttttcgcacccggttttcttacaccgcgcatcgtcatgcacatgtgttccgcttcaaccactaccattacgccatgcggatcaagcgtttctacgatgctttctgcaattgtagaagtgatgcgttcctgaagctgcgggcgctttgcaacggcttcaacggcacgtgccagtttgctgagtcctgtgacctttccgcctcgcgggatatatgcaacatgtgcttttccataaaagggaacaaggtgatgctcacacatagaatgaaacgcgatatcttttacaagaacaagctcctcatggttttcaccgaagatagtctggaaatgttcttttggatcttcattcaagccggagaatacttcggcatacatctttgcgactcttttcggagtatcaagaagcccttctctattcgggtcttctccgatcgcttctaaaatttgacgaacagcttgttcgatttgctctttattaacttctttcatgttctatgtcctccaccaatgaatacatttaatttcgattctagcacatatgccccgctaaaagcaaagtgaatgccctgtcaggaagcccatgctcttgaaatatgaaaagccccttagaaaggggcttttctgtgaagaaataaagtgtatgtaagctagatgcatacacgatctatattcacaattattttccggcaactgcgtctttaagcgctttacctggtttgaaagcaggtactttgcttgctggaatttcgatttcttcacctgtttgaggattgcgtcctttacgtgcagaacgttcacgcacctcgaagttaccaaaaccgatcagttggattttatcaccgtttttaagtgcatctaagatcgtatcaaaaacagagtcaactgcttttgtagcgtcttttttagacaattcgcttgcttctgcaaccgcattgataagttctgttttgttcatgcctttcacctcctcccaaaaggatacattcagttcgtttattatcatttcttcacagttcagtctgattctaaacctgtctcagaaaaaaatgagagcaagtaagagaaagacaattaaacggctttttaagaaaaactgcactctgaggaatgtttgtccaacaaagtgaagaatttctgtatgtagagtaacacatataaaaagccatatcaagcattttaaagcgtcaatcccttgctcgtcaaggatttaaggtgatttaccgaacaaatattcctttttttccttttttcatcctattccttgatccttttccattattaagaacaaagaaaaaagacctcccattctataaagaggtctaccggtattacaggatgatggcgattaagccgccagagccttcgtttatgattctttctaatgtttcttttaatttataccgtgcgttttcaggcattaatgacagctttgcctgaatcccttctctcacaattgagctcagcgaccttccgaagatatcggaattccagatggagagcggatcatcctcaaagtcctgcattaaatagcgtacaagctcttcactttgtttttccgttccgataatcggggcgaattcgctttcgacatcgactttgatcatatggatcgacggagcgacagctttcagcctcacaccgaatcgtgagccctgccttataatttccggctcatcgagactcatatcagctaaagcaggcgctgcaatgccgtatcccgtctgtttgaccatttttaaggcatcagacacttgatcatattctgttttcgcatgggcgaagtcttgcatgagctcaagcagatggtctcttcctctgatttcgacgcccacaacttcttttaggatttgatcatatagatgatcaggcgcgtacaaatcaatttctgccaccccttggcccagctcaattccggctaatccggcactttcaatgaattcaaactcgctgaattggccgacaaccctgtctacgtcccggagccgtttaatatccttaaccgtttccttcacggactcctgatagctttcacgcagccaatggttttctttcagcaccattacccagcttgggagattgacattcacttctagcaccggaaactcgtagagggcctctctgagcacactcagcacatctgattcccgcatgctctctacactcattgccaataccgggatatcatatttttcgcttaaatcctggcgcatggcttccgtttccgggtgatacggcctgactgagttgatgaccataataaaaggtttgccaacctctttcagctcttcaatgactctttcttcagcctctatatagtcacttctggcgatatctccaatggtgccgtctgtcgtaatgacaactccgatggtcgagtgttcttgaatgacttttcgagtgccgatttcagcagcctcatgaaatgggatcggttcttcgtaccaaggcgtattgatcatccgcggcccgttttcatcttcgtatcctttagcgccgggcactgtgtaacctacacaatctactaatcttatattcacatcgagtccgtctgacacatgaacagacatcgcctgattcggaacaaatttaggctctgtagtcataatggttttgccggctgcgctctgcggcagttcatcctgcgctcgggcccggtctgcttcgttactgatattcgggagcaccacaagctccataaattttttaatgaacgtggattttcctgtacggacagcacctacgactcctaagtatatatcgcctcctgttcgttcagcgatatccttgaaaatatcgaccttttccaagtgatcccctcccggacttcctatccttttcaattttattaagctctttcaatcaaacacaggacactatatgtgtatgacgttgtcctatttgaatatgacatctttagaaaatttctcatcctcaatctattaaagtataaaaaaacctttctccctatttgtatgcaagggagaaaggttcattcctttttcatatcattttctaaaaaaacaggttcctgtttgtcatttaccgtatattttacagaaaacgcggggacaaagggggtatcctgccaaatcatatcctggatttcagtcccgggtttaaacgtttttttgctttttttgaggcaagaagccagctcagtccggtaatcggcatatatttctccgtctccgtcaatcataagcggcaaggaattccctgagattgggcttgtcactgtaagagagcttccatccccaagcttcttctcatcgagtgtaaataaatcacgagatagcacatccttgtaaggcggatattgatgctcctgacgatacatttggatgcgcaatttcacatcgcgaattttttctgccatctttagatcaattaatttaacagtcggatcgttctctacgtcaacaagcacgtattgatagtctcccccgctttcaaatgccgtacttggaggttcagctatgtatcttggcgctaaccggttaaagtctatcggatatttttgatatagcggtgtcgacatatctttggtttgaataggaagcagccctccatttgccttttgaaattcatcaacagcagattgaacctgctttagctggtcttgataaggaatggcatgcacactgcttttccgttcatttggatataaacatccggataaaaacacgactgccgcaaaaatgattgcgcacttcagtttacccatacagcacttccttttacagctttattcattgacagggccgctaaaaaccacgacaaacacaataattccagatatgagcatacacatgtatgcgaatgatgaaatcgcaatcttcaaaaaacggttttggcacttaaagcggcttaaatagatggaagctacagccagaaacatcagacccatggaccctagagcaaaccacattttcatcaatgccagattcaatgacgtgcgcctccccgatatgtatgatgtaagcgttatattatattttaatatacagcgccggaaaagatcaaccagattttccatccattgatagaacaaaaaaactgaagcaaagagggggaccttcgcttcagtcaacttgactatattcacctgcacgtttaagaaacactctcttggacttcgatgctatagtatgcgacttggcatacagatgcatcctctattgcctaaatcggcaaaatgtttcaggagatcccaagacttgggtgttcttctgtttttcgggctttcgttcaattaagatatgcgtttcatcataccattgacacttttacttcacttgattttcaaacgtatttaccaaatcctccatctcgtgggttttccctcttgccattaaagattcaacagcggtttccactttttgtccgttgaacaggacctgatggagagcttctgtaatcggcattttaacatcatatttcttcgaaagctgataagccgctttcgtcgtgcggacgccttcgactaccattcccatctcttcaagaacatcttcaagcttgtacccttttccgagcaaattgcccgcacgccagtttctggaatgaacacttgtgcacgtcacaatcagatcgcctactcctgtcaatccagagaacgtcaagggatttccgcccattttcgttccgagtctcgcgatttcggcaagtccgcgtgtaatcaaagcagctttggcattgtcgccgtaccctaaaccatctgtaattcctgcagcaagggcaataatattttttaaagcccctccgatttcaactccgataatgtcaggatttgtgtacacccgaaaattgtgattaataaatagatcctgcacctcttctgctgccctcatgctctttgaagatgcagtaacagttgtggggtgccgcagccctacttcttccgcatgactcgggccggaaaggacaacgatatcttttctgacatcactcgggagctcaatttccataatttcagaaatgcgcagaagtgaatctggctcaatacccttgctgacatgaacaaagactgcctttttcgttataaaagggacagcctgtctcagcacttcccgaattgcttttgtcgggaccgcaacgataatgaaatctgcgtctgaaacagcctctttcatatctgttgttcctttaatggatgtagacagcttaacattcggcaaataatctttgttttcatgcaactcattaatttgatgaattaaatctgcacggtgagcccacacacacacttcatttccattatcagttagaactaaagccagtgctgttccccaactccctgctccaagcattgtgacttttttcatgtttgattcacacctttttattttctagctcttgcaaatattttgattggtgtcccctcaaaaccgaacgcgtctctgattcggttttctaaaaaccgttcgtatgaaaaatgcatcaattccggatcgtttacaaacacaacgaagcttggcggctttaccgacacttgagtcgcatagtaaatcttcaaacgagaaccgttatgagtcggtgtcggattcattgccacagcatccatgatgacatcatttaagacgttcgtctgaactcgaagtgaatgattttcacttgctttaataatcgcaggcatcagcgtatggatccgttttttcgttaaggcagacataaataggattggcgcataatccagaaattgaaaatgatcgcgaatattttcttcaaattctttcatcgtgctctcatctttgtcaacagcatcccatttgtttacgacgatgacgacggccttgcccgcttcgtgtgcatagccggcgatgcgcttatcctgttcaataatgccttcttcgccatccagcacaaccgccacgacttctgagcggtcaatcgctttcagcgcccgcagtacactatacttctcagtcgtttcatagacttttcctttttttcgcatacctgcagtatcgacaatgacaaactcctgctggttgtaagtaaatgacgtatcaacagcatctcttgtcgttccagccacgttgctgacaataacgcgttcttcgccgagcatcgcattcacaagtgaggactttccgacatttggacgtccgatcagacagaattgaataacttcttcattgtatttcgtttcaggaatgtttttaaaatgctctgcaacggcatccagtaaatcacccagtccgagtccgtgtgttcccgaaattggatatggctcgccaaagcctagcgaataaaaatcataaatattcgctctcatttctgtgttatccagtttattaaccgctaaaacaacaggcttttttgtgcggtacaaaattttcgccacttcttcatcagcagctgtcacaccttcacggccgttcaccataaaaataatcacgtccgcttcatccatggcgatttcagcctgctggcgaatctgcgctaagaacggctcatcaccgatatcaataccgcccgtatcaatcaaattaaaatcataattcagccattcagccgagctgtatatccgatcccttgtcacgccaggggtatcttctactattgaaattctttctcccgcaatccggttaaagattgtggattttcctacatttggtctcccgacaatggctacgacaggtttacccatagtacccttcctttcaatccagccgctttcatttttacataaattttcaaccggttattaaattcatttcattcacttttatgaaaagaaacccttcagaggaagggcttaactcatttattatatcagtttttactgggatcacaactattcttaaaaatgtttcacgatcaaatacacgtcatctccgattctgtgagctattccatcaaggatcgcctcaagatttttagcgaaaagctccatctccttttggtcattgcaaaaaaagacaggtgctccccctgcaacccggtttggatttgtcgtgattacagacaaaatcactttcgtaagagattcactcatcctatcaccttatcctgattcttgataaattcagtcggcattctaatcgcattttccaaggttggaacattgctaataatttgaacagccgtttcgggatggtgaatttgcgggagaacaaatactgccactctcccatcatttaaatcccgttttgcaattggtgtcaaagatggctctcctgaatcccgataaaccccgagcacattggaaacatcaaataaaatggcctgacgctgccctaaatttgctatcgtcgctgctgaattaaagtttttcggcgttaaaataaagcccatgccatgctttaaaatcagttcctgtttctctggaagcccgatattcatcatataaatattatcaacaaacagtcccggaccgtcaaagcgcggctttatgtactcgatgtctacaatatccttcaacacactgcccgacataaatttcatggccagtaaaaaacaaacgacagccgctatgacagcagcccagatggataaaaacacatacgcagaggttgtcaaaagcgctgtaaagatcacaatataatttctgctttcaaacgcaatggcaatcccctcaatatatgtgctaccccttgagacaagttcatacgaatccatttgcgtcaatgtgttccgctccatgtttcggacatctctaaattgcgtcgctgccaatgttaaaaatgtgatggccgtaaattcctcctgcaaaagcgccggcataataattgcacctaaaccagccgctatcaaccccagtgcgatgtgaatcactttcccatgaacataggtcggatactggcggtaatccgttttcagcatataaagccttgtcgcaattccggcaatgaccccaacaataatcggatagatgtaatcactcatgacattttggtagctcctttgtttgatcttttgcttttctgaccaatctggcttgcgaggtattcgtatttagatatgccaaacagcaatatcatccccgcagaacacgcattcagccattgaaagccgccgacagccatagccccggccaacttctggatcacaaatgaatacaccagttcgccttggcacatccctaggacaaataagacaagctgcttctcaaaattcctatcaacagaagctgttaaaagcactattaatataacagcagcccactcaggttttatgatgaaccaaaccgggtcatataatgcaaaaagataaacaaacgcatacgcggaaacaagcgtcagatagaccatgatgtaacgaaaacgatacattcccaaatacccggcatagacacatccgcaaacgaaaaacatcaaatatgcagcattcagggaaaaatataaagcgatgtcatgtatgcttagaataatattagttaaaataaagacagagacggcaattcgtcttttcgtcttttcaaaaataaatgttgtcagaacccacagaaaccacattgaccaatagtaataaaattgttccattttacttcctccatattcccagtatggagttcaagcacattttttaaacaatcgatctcatattaaggagtatgatcatgggaaaagacagacaagagaaaaaactcaaagcttcaggcagagtcgaatcagaccgcgaccagtccattcactatgacggagcgacaagccttgaacaaaacggaagattcaaaaagcgaaaatcataatacaaaaagcccaaaccacatatggttttgggcttttatcatttatcgcacactatagcttgatgtattgatccctctctctgtgagccaatgatgggtttcacctttgatcacaaggggcgccttttgtaaatcggcaatcgttctggtgcccagcacggtcataatcatctttaattcctcaaggatcagctgaatctcctcaagcagtccttcctcaccgctgtcagtcagggcttttaaaaaatgccctgccattccggtgcaagaggccccaagcgcaatggcctttgccacatcaagtgcatcttgcagaccaccagaagcgatcatggtgcttgcaggaaactcggagcggatttccgccaaacttgcagcggtcgaaatgccccacgagttaaaaaaggagatttgccgctgtcttcggagattttcgattttcgagaaatttgttcccccgtaaccgccaatgtcaacagctgcagcaccagcttcatacagctttcctgctgattctttgctcataccgaatccgacttctttcacaatgactggtacgctgacatgactgcaaatttgttcaatgcgttccagtgcgccgctaaagcttctgtctccttcaggcatcacaatttcctgaatcacattgaggtggatctgcagtgcgtttgccccaatcatctcaacggcttcctttgcctgggcagccgttgcctcgcttcccaggttggcaaaaatcagcccgtttgggttttcctttcgaacaatttcataggaaagacgctctgatggatcttttaatgctgacatttgcgatcccacagcaaggggaattccagcctgagaagccgctcgcgcaagcgatttattaatctcatatgtaagttttccaccgccgccagtcattgcattgataaaaatcggcgaactgcttgaaagttcgccgatttttgtggaaatatctacttgttctaatgcaagatcgggcagactgacgtgaacaaacgtaatatcatcaagacctgtttcccgcttctggccggtggacaaggcatgattgatgtgttgtctttttcgttctgctcgagtcacgtttatcaccaattattttagtttattcagcttatctccgatcagatctccaagctggaagccagtgcttgtttcttccttcgcttgatattgacggtaatcttcctgatcagctttaggcgtttcttcaagttcacgcatgcttaatgaaatgcgctcctcattttcattcacatcaagaaccttcacttttacagtctgtccttcttcaaggacttcatgcggcgtgccgatgtgtttattggaaatttgagaaatatgaacgagaccttcaacacctggaaggatttcaacaaaggcaccgaagcttacaagacgctgtacagttccttcaagcacatcgccaggcttcactttttcgccgatttggctccaaggtccaggcagtgtatctttgattgataaagaaatacgttcgttgtcacggtcaaccgataacactttcacttttacttcttgtccctcttcaacaacgtcagacggtttctctacatgagagtgggaaagctgtgaaatgtgtacaagtccgtcgatgccgccgatatcaacaaatgcgccaaagtcagtcaggcgctgtactttgccatcaagtacacttccaacttcaagagactgaagaagttcttgttttttattcgcttgctcactttcaacaacagcacggtgtgaaaggatcacgcggtttttatcacggtcaagctctacaacgagcagtgacagtgtttttcctttatagtcagtgaagtcttcaacgaaatgtgcttcaacaagtgatgccggaataaaaccgcgaacgccgatatcaacgacaaggccgcctttcacgacatctttcacttcagcttcaaacacttcttttgtttcaaattttttctcaaggtcttcccaagcgcggtctgcatcaacagcacgtttagataaaatcaaagcatcgtcttccacttttgttactttcaggtcaagctcgtcgtctactttaacaacatccgatgctttctctacatgaagacttgataattcactgattggaataataccggattgtttgacattgatgatttctacatctacatgtttgtcttctacctttgtcacaatccctttaactacatctccaacctctggcacttgaacatcaatttgattcatttcctctgtcatttgaataacctccttggtccaaacctacacagcttaattaaaacggtttgaaagctgaacatataacatgcccgcttttagccgaatatgtattaaagaatcatccaaaaaagttttttgaatgatcaataaaaagttttattagtattaacttctaataaaaggacaggtttgtcaagcaataacattctatcttcgttgaaaaattcaaaaaaagtggcatttgccatcctcagcgggacttttgctccacagcctcgaggattttatcagctacctcttgaatggaaagcgatgtcgtgtcgatttcaagagcgtcttctgctttacgcaacggagatacttcgcgctctgaatcaagcttgtctcttcttgcaatttcctcaattaatgtttcgaagttgacatcaaagccttttttcacattttcttcataacgacgtttcgctctctcttcaacagatgccaaaagaaagatttttacttctgcatttggcagcacatgcgtcccgatgtcacgaccatccatgacgacgccgcctttttccccaagctgctgctggcgtttcaccatctcttctctgacacttctgtgcttggccgcaattgaaacttggttgctgacttcatctgttctgatcgcctcagttacatcggtgccgtttacaagcactttttgtccatcttttgttgtaatcagctcaatgtctgtccgctttagcagctcagccagtttttcttcatctgtcagatcaacgttttcctgtaaagccgcgtacgtaatcgcccgatacatcgctcctgtatcaatatatatgtacgattttttctcagccacaattttggcaacggtgcttttccccgcagctgccgggccgtcgattgcaatcgataatttcttttccataattcctctccttgctcttttctcctctatggattgtatcacgaactttatgaaaaagggtgaaaaattgatgaataattaatgtttgaaggtttcaatcctattgttttcctccattttatccaccccttcatattgaatcacttttgatacgtatggttcaatatgctgatagtgaaaaagaaattggacaccaagtaaaatgatggcctgaatgaacaataatttgatcagcagccgttcaaatgttttcattggagcacctccattacaaatagtatggaagtgtttgccgatgtttattccattcgggcctttcttctcttatttaactggcgcctgatgcagtattgaagcaaagcctgctggtcacctgctgcaatttctgaatactctaaagtcatttttcgtttttctgacttggggtcattaaagattcgtctgacaactgcttctgtttctatttgacgtgtgtgctcctcttcaggaagacggatgatcaggcgcaatgattcccccgattgaaaagaaaggccatcagctaaaaccacggcgatgccgcctgcactgatgttataagatagtgtgcggatctcttcctcatttcccggctgaatttgcacatctaataccgcatcagttcttacatattggcggcgctggattcttttcattttttcacggggaggcacttcaagacagatcatttgaagtttgtccttcactttaccttttatacggcttataaagcgataaggaacttcgtcttttcccacaaactctaccgttacttccatatcgttatgtaaaatcacagttcgccctgtaactacatcaacaggatacgcgatcaaaagttcattgttttcgatgctgaccgccttgctttttgcctttttcaattcattttcttctatatattctaaaagtacagtttctccaatctctatcattgacttcactctttcgcattcaatatactcacgtttttattaaagcacgtaatgaaaaaaaggaaaagacatttagtcctttcctcctgttttttataggtctttatatataggttctgcattttttagtttttcaaccttttcttccgatccgtctttggcattgatatacattctgaaagtgtcattttcaattgttccaagcatttcgtaacataacacttcttgacctagttcatttgtaatcaaagcgagccttgtttctctcacttgtacatttttatttaatttagactttgcctctgcttcagtaattgcaggcttaggtatggttctttttctgtgagatgtgaggaagtctcttgctgaaaagccgacaacctcaccgtcatccaaggccactttcatacgaattgcctccgggtacatccggactttattttcaacaggaacatatgaaaatacaccgattttatcatattgggcactttcatcaatttccaaatcatctgtttcaaatccgtttttctttaaaaatgcaagcgctcggttcgatccgtcatttaaactgattttctgatctttcacttccctgttttggatcaagtataccggatgcccgcccttcttcgtaatatccatataaatcactgctttatggtctgggtctttcatgctgatgctatatacatcgcgatttgttttttttccgctctttaccactttaattgaataattgtcatctggggcaaagcgctcagcaatttgttttgcttcctgttcggaaatttgttttcccttcagatggctgaagcctttctcttcttttttcgtactggtgaagctcgggccaagatcagtgccagtggagaatgcaccaacatttttttcgactgttttaaagctgttgataatcgtattatcactttgtttttcgtcagaagccagggccatttctacgtccatccagcgaaggtttttgctcatgacaaggtgctgaacatgacgcaattcattttgtatatcttcggactgctgatatagcttatttagtgatgtatactcgtttttatcaagcggcttttggtccaaatctctgactgacgttttatagctgaaatcgccgatctttgataatagctcttcagttttattaaacggcattaatgtaagcggcagctgactgacactgttatgagcttctgatgtaatcctccacacatcgatcaatgcaggcgacagtgatttttggctgttcatggcaagtgttgttccgattttatcatgaagctgatccatctgataggtaagctcatgaaacgcccgctgatagttattttcagcatgaagaagaactgcgtctttttcctggtgttctttgtatccccagtagcctgtaccgactattgcaataccaagcacggcgattaaaattcctctgatcatttatcacacctctttttatgctttctcatatctgctactcacagaaaatgtgtttaccgattcttttaatctgcggacgcccccaaatccacggacttgtagccgtatccggattaaagtagtaaagtgcttcccctgatgggtcccagccattgatggcatccagcactgcttctcgtgccgtttcattcggctgcatgtaaatttgtccgtcggctactgctgtgaaggcaagcggctcaaaaataacccccgctactgaatttggaaataacgggctgttcaaacggtttaaaatgactgctgcaatagcaacctgcccctcgtacggctcgccccgggcttcgccataaaccgcttgagcaagcagcctgatatcgttgttggaaaatccaccaggcatgttcgctgctaccgcatcctgttttcttgcttttgctggtgtattgttttgctgtttattcgcattcgctttaggctgctgcgttgttttttccgcaggctgtttctgccgtgcttctgcttgttgtcttgccttttgtgttgctgcttttgatggtttcgtctgatactttagcggaatttttccgtaatgcgtgaatgtattccctttattgagctgttccatgacatattcacgatagtattttgatttacatattaaggtttgctttgttttagctcctacaaggccgtcaacctcttttaacccgaattgatcctgaaaatttcgaactgcccagtacgtcccccatccataaaccccgtcaatttttccgttataatatccgttgtattgaagacgcgcctgaagctcgaccacatcatccccggttgcccctctttgaatgacctgattcgaaaaggcagagatcgtttcagtattaataaacgccgttattgtaaaggaaaaaaggatgagacatgccataatcgatcctttggacttcatcttttcaagcctcctactgcaaatttttaagtgtaatcgtattttctgtaacgaggttatttttatacactctttccttgttatccctcagaacataaaaactgcacacaaaaaagccgcacggttgctgtgcggcttctatacttgcatcatattaacggaacgggcttttttcgctttacgcaaaccaaaccaccataaaaataccataaatggaagcatataataaatccaattgctaagcgctgttaggataaaatcatatgatccatgcaaaagggatgggaccactaaagaaagagtaagccactttacacgcgccttatcagcggaaaaacgggcttttccaaggtaaaatcccattataacgccaatcaaggcatggcatgaaacaggcagcagcgccctgacaaacgcatgctccacgccgtggccaattaaataaagaatattttcgagggttgcaaaaccgagtgatacacttgtaccgtacacaatcccgtcataatgctcatcaaagtgggcgtgcgggtaaacactgatcatcagtataaaccattttaatgattcctccaaaaaccccgaagataaaaaagaaacgaaaaagcttccgcctcctacattctctttttcaagtacatactggataaacattatgggaaatacaagaacaaccccgagaaaaaacgaccgtagcaccatatgtacaggttcattatcatactgatcttttaaataaaaataacttaataacgcgatgccgggggcaattcctgcagagatgattgcaaacatcaggcaacctctttcctttatattcctacgtctatcctaccatgttgtttaaaattttacatctgtctgcacttaaaaaaacataaagagcatacgaatgcatcatatgctcctcatctttaatggttttctcttttggcgatttccgctgcgatatgcccccgtgaaacctgccgttttcaataaatatttcatttgcattgtttcccgcagcaataacaccggcaataaagacaccttcaacgttcgtttccatcgtttcttcgttgaaatatggacgccctgtttctttatcaatttcaacaccaattttttcaagaaattgatgatcaggatgatagcctgtcatggcaaatacaaaatcatttttaatggtaatgagttctttctctccggagcgaaacacaacttcatcctcggtgattttttcgacacaagcgccaaattccatacggattgtaccgtttctgacgagagcttcaaattccggcagaatccacggcttaatgcttggagaatactcattgcccctatataaaactgtgacacgcgccccagatttcacgagttcaagggcggcgtccacgcttgaatttttcccgccgatgacaacaacatctttatcaaaatacgggtggccttctttaaaataatgaaatactttcggcaaatcctcaccgggtatattcatatagtttggatgatcataatagcctgtggcgatgatacaatatggcgtcgtgtaggtctcttttgacgtctcaataacgaatgtgtttttttgcgttttcgtcactttatgcaccatttcaaacgcattaacacggatgtttttccgtttaacgacttcccggtaatacgataaagcctggattctgacaggcttcctgttctctgtaataaatgccacatctccgatttcgagcttttcacttgagctgaaaaaggtttgatgcgtcggataattgtaaatactgttaacgacattgcctttttcaatgacgagggcatcaatgccaatttgttttaggtgtatggcagcagatagtccacaaggtcctccgcctataataattgctttttcttgaatcatttctgtcaactcctgcgattggcatttcacttcatattttctatttccgaataaaaaaatctcctattttatcataggagattttttatttttatgcaaatcatcaacttatatccagcctctaaaacgcgaagcttcagccattttgcgaacgccgaccatatatgcagcgagcctcatgtcaattcttcggttgttagccatttcgtaaatattgttaaatgatttgaccatcattttttctaatttttcttctacctcttcttcactccagtagaagccttggttattctgaacccattcaaaataagaaactgttacgccaccggcacttgccagcacgtctggtacaagcagaatgtcccggtctgaaagaatttttgttccttcaagcgttgttggtccattcgctgcttcaacgacaattttagcccggatattatgggcattttcttctgtaatttgattttcaatcgcagcaggaacgagaatatcacaatccagctccagcagctcttggttggtaatggtatcgttgaaaagctttgttacagtaccgaagctgtcgcgtcggtcgagtaaataatcgatatcaaggccttccggatcataaagtccgccatacgcatctgagatgccgacaacttttgcccccgcatcatgcataaattttgccaaatagcttcccgcgtttccgaagccttggacaacgacacgcgcacctttaatatcgatgcctctcttcttagccgcttctttaatacagatggtaacaccttttgctgtcgcagattctctcccgtgagatccgccaagcacaagcggtttgcctgtaataaatccaggcgaattaaattcatcaattcttgaatactcatccatcatccaagccatgatttgtgagtttgtaaatacatccggtgccggcacgtcttttgtcgggccgacaatttggctgattgctctgacataccctctgctcagacgctccagctctctaaacgacatatcccttggatcacaaacaattccgcctttaccaccgccatatggaagatcaattatgccgcattttaaactcatccaaattgaaagcgccttcacctctttttctgttacgttcgggtgaaaacgtatcccgcctttcgttggaccgacagagtcattgtgctgcgcacgatatcctgtgaaaatctttactgaaccgtcgtccatacgaacaggtatttttaccgttaataatctcatcggctcttttaacaattcgtatacctcttcgggatatcccaatttttccagagccttatgtattacggtttgggttgattttaatacatcaagtttgtcctcttctgtatgaccggtgtttcgatcggctgccatttgagttaacctcctagaatcttctgtttctcacatgctccctttcagagaatagtatacaccttcatatgatctgtgcatagaataaacgttatgtttttccatgttttttaacgaaaaaaaactgctgaaatcagcagttttccgttgcattcttatgaaaaatgagtttgtatcgtctctacggcattaccgtccataatgagcttaccatactcttgcaggcgataaatcgttaaagttgtcggattgccgtattcagccagaaccgccacaaccccttcagccgtatgtgaccctagatcttcaaggcttaaaaagtactgcccgtcatagtggtagacagttccccctgtgataccgattcgctgtaagctttctgaaagctgaatgatatcttcaaaggaatggaattgatatatgatgtccgcgctttcatcaagcttgacttgcatttcgatgtaatcatcatcatactcatcgtcttctgaatcggcgtcttggttctttgttacaatcacgaccatcccttgtgcttggagagaatacacttccactgcaatcggtccattcgcttcaaagccgagctctgtatttgcttcattcatcatatctttaaataactggtggactttgaatgagtccttccagaggtcttcttttgtcaatccccggtctgtcaaatcatcgagggttaaaaagattttgatcttattataattcagacgctcaagccgcataacgttccctcctgcctctacttgcacacaaatcatataacacattatatgagatgatgagtcataggttcttaattgttatcagtttacactgagttcactagtaagacaagcacaatgcagtttttattgccatatggatttttgctttttagaagttattctggcccgcaaagagtcacaatgtgtgtttcaggctcagcacctaaacgaagaggcacttttgtcgtgccgtagccgttgctgatcagatatgccgcgtttttaacaatacctgttttccccagttcataaggaccgaattttccaaacctgatctggcctccatgggtatgtccgctgagtatcacatcaataccgtcatcttcattgatttgttcatgaatctccggattatggcaaaccagaatattcagctggctttcatcaagttctttgatggcttcttcataatgatccatctccatcctgatatcatcaacccccgcaatcgcaatcgtatgcccattgtatgaaaacgggactgactcatttctcagagtgatgacgccgtgcgctttaaatatggaatacagcttatgctgcctgacttcataatcattattcccccacacaaacacgatagggaccccgaaatgtacgagccttttgatgttttcctcgattctcgcactgggcaccccgccctcagctaaatcaccgccgattataaccaagtggggggcatggcttcgcgctttttctaaaaggtcttgatcgatgagacgtttgtgaatgtctgaaataaaaaagattgtcagaggcggcttgcccttcatctttgataaaggaaacgtatgtgtcttcaaatgattgccttttgctgttgcatacatttttgccgtcattgccgctgccgcaacagttagtacaccggcaattttcactgatagcttcataaaaaaactctccattctttttagaacttatcaataagacggacaataaaaaaaagacgtttctatcgtttgagaaaacgccccattttatttactttcaaaatatagattaatgtcatatttgtgcttcatcatatgaaaaacagactctctcgccttccatttatcgggctgcggccagagatcagtgcttttctgaataatttcacatctcagtttatggaaatcagtctcggatttttcttcctttttcttgaaataatatgaagtacagtaggcaaaagcggttgccagcatccaaaataaataaaaggtatggctaagtatttcttgaagtataagctgaggctccgggcttttgatcatgatcataacacataataagcctaggcagataagtgaagcccatcgccatctgcggcattgtgctgcataattttcgaatttttgttttcgttttaccagcgcttggagcatctgtttggtcggcgcgtctgtaaactgatccagctgattccataaggattccatacgcttcacaccttgtccattttcattgctacaatatatgaacgtaaaataaaaataataccctattcatccattaaggggatgtccaaaacttgtccggtgtaaacatcatttccattcagatgattatacgctcgaattttttcttctcctgtccggcttttataatacttcatggaaatgcggtatagcgtttctttcttttggacggtgtgcttgacaacgcgattcggcacattttgaactggctcagctggctgttcttgctgttgtactgttgattgggaagaggaagcagccgcggcggttgcttcctccttatttgccgagtcttctttatccgctacagcagtctgtttcttatcagcagctgtttttgccggctcttttggcttggaatcttcaggctcttgttttgactccttctgcagtgcggtttctttagtgtctgcggtatcgtttttatcctctgatttcgggacaacctcatatttgctttggctgctgtcaataaaaacatcttcataatcgtcatgattatccgggtggctctttagataaaataaggtgactaaaacgataaccggcacaaatacaaatattactgcgagtactgtgaataatggcgtttttgttttgccttgcttttttttctgttctctttgattttttacagattgtcttgtcggaaggctttctccatcatcgacataatcgtccgccaatgcggcgttttgatcttcataaagattctgggcttttcttctctctactctcgacatgttcgtcatgtttatccctcctcacatgttcaaaacgaatctgacaggcaaacacggcatcaatgataaaatgcgccgtcatcggaacaaataagttgccggtccattcatacatcagaccgagcaaaaagctgattgctgtcaccataataaataacagccattttgacaaataccgaaagtgcagagcggcaaatataaggctggccgcccataaaccgatatgagtctgcagcactcctctgaataacatttcttccgcgaaagcaatcagaagcgttaaaaatataatatgagggattgacctcttactgaatatttttttattgattccgccgtcatcatataaatgagacggaaaccatttcattactgccatatcggctaaaataacaataacagctatagaaacaccataccagatgattcgcatatcgcgaatgtcccagagctttaatacgtcccgtacatcctcaaaaaagaacagtcctgctgcagcagcggcaaagatgatgagtagctgcgtcaaatataactgcttcagcatatcacggtcagacatatgctgaatataatctttttgctgtttcagttcagctcacctacagtctgcaagctgaatatccggtgcaattccgaactccagctgtctaatggcgccattttactccgttcccctttttgttcatacaaggataaatcaaaaccgcaatgtgaacagcacgggaggtttccgtcatcaggctcgtatgattcatcaaagtaggttaatagtgcctgccttaaacagccatcacgctgaagcaaaaatgatacacggtgcattttttccagcttcagctccatgcgatatgaaatttctttcttcatcagttcaactgatgttttcccctgcataaagagatgaatcatcatacgggcctgtgtctctccgacgccatactgaagtaatacgtcacgaagccttctctcatcccgctcctccgtcttctctagcacacggatcacgtcggcgatttcttcagctgtgacactctccatctggataatctgttcctgcaattcaaaatcccctggcgcccgcagcaaaatgctgacactcggctttccgtcgcggcccgctctgccgatttcctgcataaaagcttctgccgtctgcgggaggtgaaaatgaatcacatatctgatatcgggtttatcgacacccattccaaacgcattcgtacaacatatcacatcaagctggttatgaataaactgctgctgaattaaaatccggtcccctgactccaaaccgccatggtaaaagtcggctctgctgctcgttttgctattaatttcacccgctaattcctcggcccatttccgtgtcggacaataaacaattcccgggccttgcagattttcaaccagctgaatgaccctatctattttttcggcagtatccgccgcattttcaaccctcagtgcgatgtttgggcggttgactgagttgagatggcgtacagcatgctgcagctccagcaggttcatgacatcttgcagcgtttcctttgtagccgtggcggtcaatgccagaacgggcgggtgaccaagtttttttctcagctgcccgagctttgaataatcaggcctgaagtcgtgtccccattcagaaatacaatgcgcttcgtcaataacaaataggctgatcgggacgcttttcaatttttccaatacatatggagactgtaaagcttcaggagacaagtacaaaaatttatatcgatgaatatgttctaaaacaaattgtctttcctgcctgttaagcatgctgttcaaagctgcagcacgcttttccccccgggctttgagctgctgcacctgatcctccattaaagaaagcagtggagaaacgattaataccatgccgtcaagcatataaccaggcagctggtagcaaagcgatttccctcccccagtcgggagcattgcaatggtatccttcccgctgagtatgctttcaataatgtcctgctgcccttttttaaaggaagtaaaaccaaaaaactgatataacgtttgctgtaatttagtcatattgctgcacctgctttgtcaatgccagtctgatttgaaagtagctgaaccgctgttccagcccgtcgcgaatttgtttgattttattcgtccgcatccgtttggcaaactctgcgatttgaagctggtcttctgctgatacatagtcattaatcataaacgcaggctcatggagagaaatctcgacaatgtggtcttcaatcgtcgctgttttcagctttctgatttcagcaattcgctgtatcggaaacccttgtttgaccatctgccatgttttcctcgtcgactctgtcagggcattatctaagtgcacatcagaaaggagatcctttaacaaagcatcttcacactccggaagagaatgaataaaataatgtaccgaagcccaaaacatgatatagacataccattcgtcttctttcagcgtatcagcaagctgcctgctcgtataaccgatccgatggtgcgaggttaaggagtagacaaaaatttgcgctgctttgttttcaatctttttcaaatgcgcctcaagcatggcaaaaaggctttttgccatctctatatgatccgtatgccgggacaggtatttctttacccagtgaagtgtcttatgatcctttgtgacagggatatactgcctgctcccttgctgtttatgggataggacctgcacaagcagcgaaagccttttccaaagcacgccggcagcctgctgataatgagcgccgtgacaatgaacgggccaaggccgctcgctaagggcatgtctcaaaactgctgcgccgctggctgtcactttgtatgtatctgattcagacattggcgcgagatatgaatgcttttcaagcttgtcaagcgacgcagaaatatcgcttctcgaacattttgccgccattccaaagtattttgcagtctgaaataagccggcatcttgaatggtctgtgacgatctcttgcctttgaataggtgaaaaacagcgcttcccgaccgttccccgtttattttgcaaagacaatcgagaaccataatatcgaagtaatttaatgacaacctatccacctacattcttcctgacaaaaatcgttgatttgctctttttattttaacagatttcaaacagaaatcgacgtttaaagtcatcattaagggggatgttatgtagataaccccttatgtgataagcattctcaatcatttttctgttgaaatgtggcagcaacatcattacaataagtaagaggaataggtgttaaattgattaaatataaagattgatccatttgttccaccaagaacaatctgggaggttttattcatggcaaagtacacaatcgtagacaaagatacatgtattgcatgcggcgcttgcggagctgctgcaccagacatttacgattacgatgatgaaggcatcgcgttcgtaacgcttgatgaaaacaaaggtgttgtcgaagttcctgaggtactggaagaagatatgattgacgcatttgaaggatgccctactgattccatcaaagtggcggatgagccatttgaaggcgacccgcttaaatttgaatagaagtaactaaaaaaagctcccgaacgggagctttttttagttaatggatatgtgcacttcgctgctgctcaatccatggcttaagcttgataaaaattagtgagaatacaaccgtaattacaataccttttatcatgttaaacggcaggatacctgcgacgactgctgtttttagcgcgctgtcggataatgccggtgaatgtaaaaaccatgtgtatgccggaagaattagaacataatttaaaatactcattaaaatggtcatcgctgcagttcccaaaagcaggctgacagccaagccctttgctgagttgagttttttaaataagaaagcagtcggtaatataaagagtgttcctgcaataaaattcgcaatttgccctacaggaactccggccatgcttccctgaatgatatactgaagaacattttttatcgcttctacggcaatacccgccaaaggtccgtaaatcagaatggcaataatagcgggaacgtcgctaaaatcgatttttaaataatccggaagacccggaaacgggaaatttaacagcatcaaaacaaatgcaatgctgctcagcatgctgaccacaactaatttttttactttcacttcattctctccttttcgatcacatcttactcgaaaacggaaaggttcttttccagccaataaaaaaaccgcttcatatataaaagcggggtttcgaaaattaggctaggcaaagaaacgtttgaaaaattcaatttcaaaacgcttatgaacctccatcttctcccatccagactgtactgtcggctccggaatctcaccgaatcctgctgtaaagacagctcgcgggcttagagccattggctcatcaccgccggtagggaatttcaccctgccccgaagattgatcatatgaaatttaattacattataaacgataactggttggctgtatagagaattgcttcaaattaaatatattacctgcaagctatcagatcattgatttattaggctttacttttatcctttactgcgtcaatacacgttgacactcttttgagaatatgttaaattatcagatatttagtttgtcaatttaggaggaaatctaacgatgtttcgagtattggtctcagacaaaatgagcaacgacggtttacagccacttattgaatcagactttattgaaatcgttcaaaaaaacgtagcagatgcagaagatgaattacatacttttgatgctcttttggtgcgaagcgcgacaaaagtaacagaagaccttttcaacaaaatgacttctttaaaaattgtcggaagagccggtgtcggtgtcgataatatcgatattgatgaggctacgaaacacggggtaatcgtgatcaatgctccgaacggcaacaccatttcgacagctgagcatacatttgcaatgatctcttctttaatgagacacattccgcaggctaatatctcagtgaaatccagagagtggaaccgcacagcttatgtcggttcagagctttatgggaaaacgcttggtattgtaggattaggccgaatcggaagtgaaattgcacagcgtgcgagagcgttcggtatgactgtgcacgtttttgatcctttcttaacggaagaaagagcgaaaaaaatcggcgtaaacagccgtacatttgaagaagtgcttgaaagtgcggatatcattaccgttcacacgcctttaacaaaagaaacaaaaggcttattgaataaagaaacgattgcaaaaacgaaaaaaggcgttcgcttaattaactgtgcgcgaggcggaattatcgatgaagcagcacttctcgaagctttggaaaacgggcatgttgcgggagcagcgcttgacgttttcgaagtcgaaccgccagttgacaacaaacttgttgatcatccattagtcattgccactcctcacttgggagcatcaacgaaagaagcacagctcaatgtcgctgcccaagtgtcagaagaagttctgcagttcgcaaaaggcctgcctgtcatgtcagctatcaacctgcctgccatgacaaaagatgaatttgctaaaattaagccttaccatcaaattgcaggaaaaattggcagccttgtatcacagtgcatgaaagaaccagtacaggatgttgccattcaatatgaaggcacaattgctaaacttgaaacatcgttcattacaaaagcccttctgtcaggctttttaaaaccgcgcgtagactctactgttaatgaggtcaatgccgggggtgtcgcaaaagaacgcggcatcagcttcagtgaaaaaatttcctcttctgaatctggatacgataactgcatcagcgtaaaagtgacaggagaccgcagcacctttactgtaacggctacgtatattcctcatttcggagaacgaattgtcgagatcaatggatttaatattgatttttatccgacaggtcacttggtgtatatccagcatcaagatacaacaggtgtcatcggccgagtaggacgtattctcggagataatgatattaacattgcaactatgcaggttggccgtaaggaaaaaggcggagaagccatcatgatgctttcctttgacagacatctggaagataaaattgtgaaagaactaacaaatgtccctgatattgtgtctgtgaagctcattgatctgccctaatcaaaaaaactcaagctatctatatagcttgagtttttttatttctatccccgtgtgtttttatgcaaaatatctaagacactccttagctcagaaacaggaatttggcctggtgcggacgcctcttctccagctccaaaagtacaagccgatccaaaaacctcaccgctcagcctgctgatgagccctgttgcagccattgacattgtaataatggggcggtctgcatattttgttttcattgtatacgtcgcatcaagcagtgttaggagatctccagtatcattcggcatgacagccatttttggaatatgcgcgcctaagtcctgcatttttcgaagtctggaaataatttcatcttttacaggtgttttttcaaagtcgtgatttgacatcaccacatagacgttgttttcttccgccagcgatactaacgcctttacatttgcatctcctgaaaataattcgatgtctatcagatcgatgtcttttgtttggattgccgattctagcaaagcaagataggaactttcgtccatctccatgctcccgccctctttgtgggttctgaatgtaaatagaaatagcttgtcttctaaagatttacgaagcttagaaatgagctttgtgaccgcttctctgtcattcgctttttcaaatacgtcgactctccattcaacaatgtccggattcagtaattttactgcctctgcttcattcagaatttgtttttccgtctttcccatcagcggaacgatgattttcggcattccttccccgatggaaactcctttaattgttaacacgttcactcatctcaaatcctttcaatcgttaccttgttttattatacacgtacaacttttttttgaaaatttctattatatgaatagcaactaaaaaagagcctcaaagggcccattttagtttaagaaaatcggatttggagcagccggtaccggaattgcatctgatacgtcatatttgccgattttgtttgttctggtttcggtaaaggtcacttctgtgaagccaaactcttttgcggttaaaagaagtccctcaatcattaaaatactggcaatagaatcctcaacttctgagtcctttgagaaacggatatataagtgcttctgtttcttcgttacagattggacagtacccgcttgaataagcggtgttgtatctttttgactgctcgattccatttccttaatcgcttcttttactgtatcaaaagaatgatttgacggaacgagaaagtcttgtccttgtttattttggtacaagtagtaggatcgttttgactgtttgggaatcgaaatttccgtaaaagtgccatatgagccaatccgaaccccagtctcattttgatccgataaaaatttgactttttcataaggactccattttaaggattctttaagcaatttttttaacagtgtatcatcttttacagaaaatgccgtagctggctgatggactcgtatacttaattccttctgctttggtttttcttttatttctacttcatctatgaaggatggaattgtaatggcatgatccaagatatccaattcactacttacagtcagcatgtcctggatcgtttggtatgcatttgttttttgaatgctgacgggtataattgcagatgtatcggcatcagcaactgctacagtgatgtaattgtcttgttccttttcaggtacaacaaacgatgtatgatccagggatgatgcagcttttgggctgtcttctgtctcagttttcgttactgcgttctcttgggacgcttctttttgttgaggctgtgcctgatcaaagaaatgaggagaaataatgaaggcgatataaaccgcaattgcagcggcacacgcggggccaatccacctgacagcgggcttatttttacgctttgccatcgtcagccgcttgtaaatatcctgaggcgaacgatggtctttaactgccggaagttgacttaacaactcctttatctgttcttcgttccattctgacttcatcatccattagctcctccctcaaaagctccatatgtttccgaagtactttgagccctctgtgttgggtcgtttttactttgctttccgagaagcgcagagccttggctgtttcctgtattgaatatccctgaataaaccgcaagataatcacagctctttgatcgattgtacattgatcaagcgcagcataaatttcccggacattttcatgttgaacggcaagttcgtccggtagcaattgctgatccctgacatcctgtgtatcccagtcaaatgtaccgagtatacgctgtctgattgtttgctgtttacggaaccagtctatcgcaacatggcgtgcgatagacaatagccatgttttttcactgcttcttccttcaaacgtatgataagaatttaatacccggatataaacctcttgaagaaggtcttctgtctggtttttatcctttaccatataaaataaaaattggtacaaatcttgatgatatgtatcatataataattgaaaggtttcttccatttgaaacccctccgttcacttttttgtcgtatgaatagcttgaaaagttacattacaactatattacgagtaactggaatttggaagggaatttatattaacatatccttaaattttattaatgttggctattaaaaaaacacccgctcagtcagcgggtgtttcttatggaacaagattcttcggcaaattcagactcgattttaccgttttgtcggaatataaaaagtaaatgttgttcctttatctattcggctgtgcacagtgattgatccgttgtgggcttccacgatatttttaacgatagccagccctaacccggttcctgctctgccccttgtccgcgctttatctgccttataaaaccgctcaaagataaatggcagatcttcttccggtatgccggacccggagtctttgatatcaattttcaatccatccttcacagaatggactgaaatggagacactgccgccggctgaagtatgccgcagcgcgttatcaatcaaattggtaaatacctgctccatcttgtcttcatcaaacataaattcctcttctgtgagagaaatgtcatgatctaaagcaatatttttttctttcgcaacaccggaaaacttccggatgatcttttctaaaaactcattcacattgattttttcataatgtaagcctgtatggcctgattccattcgggctaaatcaagcaaatcattaactaaacggcccattcggagtgattcgtcataaatgatttgggcaatttctttccggtcttcttcagagcttgcaatgtcatcaacaattgcttcactgtatccctgaagcatggagatcggtgttctcagctcatgactgacatttgcgataaagtcctcccgcagcttatcaaggcggcgttcttctgtcatgtcacgcagtacggcaactgctcctctgacgtgcgattccgcataaagcggcgacatcaaaagcacccatgatctgccttgcagcgtcatctcaatcatttgttctttttcagtgctgacagcgttttgaaacagctcttttgcttcaggcggaaggttgtcgccttctttgatattcatgttctgttcataataccaagcctgaagaaaacgttcagccggcgggttggtcacaagaatcgtaccgtcaatattaatggtaataaccccgtcagccatactgctcaaaatgttagaaagctgctctttttcttgattgagcgcattgatatgaaagttaagctgccggcccatttgattaaaagcggtcgccagttcaccgatttcatcctgagttaaaatcgggatttttgtatcgaacttgcccttcgccaaatcctgcgcgccttctctcatttttcggagagggtacgtgaccctgcttgataaaaagaatgcgaaaaatgtggtcagcacaatcgcaattccagcggcaagaaaaatatagcgggtcgtatgttttgttgtatctttaacggcaagcaaagactgggataaaaagaccatgcctttctttccgtctttttcatacgggacacctacaatcaggcgttcattatccgtgtctgtatcgctcagtcccgtccgtttgcttacttttttatggtctttgagagctttatttaagtctttgtcatgctgtatttgctcaaccgtaatagacgacaggcgatttttatcattcggagaataccagtggttcttctcatcctggatgatggcaatgcttgttaagttatcagcgagttcccaagtgattgaccttgccagtgcctggtcctcgtgattttctaggatgacagcaactttattcgcaagctgtgttaaatcattctcagcttcttccacatggtagttttcaataaactccagcaaaagaaccgttaaaatgaacaatacgatcaagacgagtgaaaggatcgtaaaccacagcttgcctactacgcttttccaaaatttcattcagcgccgacctcaaatttataacctacaccccatactgtgacaatttttttcgcagcttccggagataccttgttcagcttctctctcaagcgtttgacgtgagtgtccactgtccgtaaatcaccaaaaaactcatattgccacacttctttcagaagcttttcccgatcatacaccttgtcaggcgttttcgctaagaaatatagaagctcatactcttttggcgtcaggctcacttctgttccatcagctgttacgcggtgagcatcatggtctattgacagatgtgaaaacacgagcacatttttcgtcggtgtattggcattgaaataagaggtttgggatgctcttctcaaaagggcctttacacgcagcacgacttctctcgggctgaacggcttaacaatataatcatctgttcccgcttcaaacccctgcacccggtttgcttcttctccttttgcggtcagcatgataatgggtgtcgcttttttttcacgaatttgccggcacacttcaattccatcagtccccggcatcatcagatcaagcaaaattaagtcataattggcttcaagccctttggcaatggcttcatcaccattttcagcttcatctatagcataattttcacgttcaagatacattcttaaaaggcggcgaattctggcttcgtcatcaactactaatatttttgtttcgttcgtttggtccatgttttccccctgctttccttctgttactttcattttatcaaatcgtgagaaagtttgagaactgtgtcgctttcaaaggactatgcataagaatgaagtccggcaagcacaagatttacgaatattaaattaaacataataatagcaaaaccgattacggccagccatgctgacttctcaccgtgccagcctcttgacagtcttaagtgcaagtaagcggcatagaacaaaaacgtgatcagcgcccatacttccttagggtcccagccccaaaatctggtccaggcgagctgagcccaaatcattgcaaagatcagcgcgccgagtgtaaagatcggaaatccgattgatacggccctgtacccaacctcatccaccagatcaagattgacgtttttcaccagcggatgtaatagagcgctgattctttttctgatgatcagacggagagccccatacaacacaagacctgctccaaatgaccaaatgacagtgttcacttttctgcctgagaaaagcgcgggaagatcaacaagcggttccattcttccttcggtcaaaagctctccctgatgcggaccgacaagcgcgggcatttcgtacaccatcacgtttttttctttacttttgtccacccagttaaactccgcttcatagcctgcaagacgaaatgctgatgtgattgcaataaaggcgacggttgtgaccaggataaacataatcgcttcaagccagaaggtctttttgcttggctttgtctggtctacatgcttcaaaagaaagatgacaccagcgacaaagctgatggcaagtatagcttgcccaagcgcggccgttgttacgtgaatatacagccagttactttggagcgaaggaattaaaggcgagatatctgtcggaaacatgctggcgtaggcaatcagcaataaagcaattgacagcgtaaacaggcctaatgaaggcaatctatagagaaaataaagaatgataaacgccaaaacaagcatcatgccaaaagcggtggtgaattcaaacatattgctgaccggcgcatggccgctggcagcccaccttgtgatgaaatatccaaggtggcagaaaaaaccgacaatagaaagggtgattccaatgttggcccatcggtttggcctgccctttttatctttattcccgcgtatggccccgccgaagattgggacagcgattaaatacacaagaaaggccgcataaagaaaatttccgctcagctctgccatgacatcactcccttttcgcctatttctgtgttttgattaattctttttggtccaccggttcagtcagtccggaatcagccaatataaatgctaaatccttcttcaggccaaaccagtttttattggtatgccccgctaccataactgcaccgtcctgtgagtgcagccaaattcttcgatgctgccagtacataccttgaataacaccgatcataaaaatggctccgccgacagcaagcacccagagtgtcagatcctttctgactgtaagtccagtaatgtttttcgtttcgacatggtcaaatttcagcttgtatttattattgcctgatccttcgatggtttcttggatggcgacaaagctcttttcgcctttcggtttgtccggcgttatgatattaaagacaaaagccggattgttagggatctttgtttttgtgctcggctctccgtcctgattaaagtagaagtctggcaggtagctggcgatttccaccttgtaaccgttgccaagatcatagaccgaatctggatccagaaggttgatcttcaggctcccaaaggatttttttgtttttttatcaatcagctggaacaccatttggtcaagctgattctctttgtaatccacctggtaaacggaaaaagaatcaaaacgcagcggctgattgacacggatgtcttcttctgttacttttttcagcttcggcttctcgccataaacaattttcccttctctcttgtagagtacggcatcggtttgaaagttctttgccactctaccgtccccgactctgtcaatggcatctgcaaatacctttttttccgttttgctgttataggtctctacgctgaattgattgtttttcaaataatatttcccgtctgtacccggaattgctgcggtttcgccttctctgacccaaagcgtctcatcgacatacatgccaggcacaaatctcagcatcgcaccaaccagaaagatgattaatccaatgtggttgacatacgggccccagcgggaaaagcgtcctttttcagcaagaatgctgccctctttttctctgattctataatgttttttctttaatagagcaactatcttttctttcgattccccgttcagtacagtaaccgtttcactgaacaagcgctgcctttttaaaaaagccgggctccttctgacgccttggttttttaacgctctgtacaacggaatgacccgatcaaggctgcaaatcacgagtgaaatgccgatcgaggcaatgagcagcaaataccaccaagaaccatataaatgatgaaaccctagcaaataataaagctggccgaacgtgccatactgctccttgtaataagtatcagcctgtgcgcccggaggcagataggcttcctggggaaaaatggtgccgaacgctgatgcggcaagggttatgacgataagccatattcccaccttaaccgaggaaaagaaattccaaattttgtcgataatcgttttgttataggtttgcgaacgtcttgcgcttccgtcatatctcatatcagcgagcggaggttgagtttcctgaagagctcttccgcacgattcgcataaaacggttccaaccgggtttatatgtccgcattcacatttgacttgcttcatcccgaagtctctccaggttttatgagattcatatattcgtgtatcatgctttctgtcatagtgccggtcaccaccttgacaacttttccttccggattgatcaaaaaggttgtcggaagcggagatacgtcataggcatcaagcacttggcgatctgtatccagaacaaccgggaaattgactccgtaggatttcataaaattatgtactgctatctttgactccccaacatttacagcgacaatttcaacaccttggcttttaaaatgcttatattggtttgccatataaggaaactcttttttgcacggttcacaccatgtaccccagaaattcaaaaaaacacctttcccttttaagtcactgagctcgatacgtttcccattcgtatcctcaaggacaaaattcggtgcgtcggacccttcggatatactctctttgccggcaaatacagcgttgtaaatggtatagccgagtgcgcagattaaaacgagaaggatgccggtccgaatgaataaacgcctttttttcttcattgtccactgcccccttccccctattgcagatccattcaattatatcattgcacgttcatttcacatttcttactttttgaaggttatgtgaaatttagaaagcgtttttaccgtgatccgccagtgctctgagcctttttacttcgtgaggcgtaagctctctggcatcgcccgtgtgcaggcctcgcaggtttaaaaacgcgtattcctcacgcttcagcttgattacctcatgtccgatcgcttcaaacatgcggcgcacctgtctgttgcgtccctcatggatcgtcagctgaataatgcttgtctgctttttcttatccaaagacagcagcttcgctttagcaggcgctgttttgccttcctccagcctaattccgcgctccaactttctgagcagctctttaggcgggattcctttcaccttcgccacgtatgttttgtctatttcatacttaggatgcattagcttattggcgaattcgccgtcattggttaaaagcaaaagaccgctcgtatcatagtccagacgcccaatcggataaatgcgctgcggaatatttttaaaaaagtccgtcaccactttgcgtcctttatcatcttgcgctgcggaaataacgcctcttggtttatataagagaaagtaaaccggctcttcgcgttcaacctttaacccgtttacctcaatctgatcagaaccggtgaccttaacacctagctctgttactactttgccattcacctttacttttccttctttaatcagctcttctgcctttctgcgcgacgcaactccggcatgagcaatcactttttgcagtctttccatgtctttcacctcaagtattatcttacttttttcaaccttaacaaacaagctttttcaaattcctatgccaaatctaaaaaaaacgccgttttcaggcgctcccaaataataacgtaacgatgatgatagatgcaactacgccgattaaatctgcaagaagtcccacctttaatgcatcacccatttttttaatgccgactgctccgaaatacacagtcagtacgtaaagcgttgtatctgtagatccctgcatgacggaagccagcctgccgataaaggaatcgggcccgtatactgcaattaaatcggtcgtcattccaagtgcggccgtaccggagatcgggcggatcagagcaagcggcactacttcagcagggatgccgatagcggagaaagccggttttaaaagatccattataaaatcaagcgcgcctgatgatctgaaaacagttatagcgacaagcattccgactaaataggggataatggaaaaggcaatttctatcccctctttcccgccttcgacaaacgattcatatgtgggaacctttttgatcgttccataaagaagaattccggcaataatgattggaatcatggctaaagacagccagttgatgatttccatccgctcaccttcccttctttttgcggcggtaataaaaataccgatcaatgataatggcaccgattccggaaataagcgttgccaaaatgcttggcccgacgatatctgtcggcgttttggaggaataagccattcggacagcgatcaccgttgtcgggatgagtgtgatgcaggacgtattaacagctaaaaaagtaatcatcgaccggcttgcttccgatcggtttccgttcagctttttcatttgttccattgctttaatgccaagcggagttgctgcatttccgaggccgaagaaattcgccataagattagataaaatatagcccatcgccgggtgatccggcggtatatcagggaacagtttagatataaaaggtctgcacatccggctgaaaatatccaaaagccctgactgctcggcgattttcattaagccaagccagaaaacaagcacgctcatcaatccaaatgagatcgtaatcgcttctttcgcacccttaaacacggcttcatttacatcttgcagagttccgttgcacatcgcaaaaacgagtccgatcacggttaaactgacccaaattatattgaccattttgctccgcctgccgcattcagaaagattgatttaaacgtttcaaaaaattgtttcttcggtttttgatgccgctcattttcataatagatcggcacttttgcgatggttgcatcgttgaacatgatctccatgtgccctacgatgtcagggattttcgaggcatctttttcccatgcttttttcggcttgagcagtgtggtattaatttttacattttctttttcctcttcggtcagtaaataggtgatatcacgtttgataaaagccttcgattcataaaatgtgcctttcagctttggaatatcccctttttttgcaattaaataggtttgataatgctcaaacacatagttaaacatcttcatatggtcatcccaatcattagggtcattaatggtgacggctatcaggtcaatgccgtcctttgaagccgtagagaccagtgtccgttttgcaagttttgtatagcctgtttttcctcctgtgctgtacggataaagcatggtcagcagtttgtttttgtttttccatacgctttccatcgtttccgctttgtatatttttgtgcctgaaatcttttgatagtctttcagcttcatagcatacttagttaaaatggccatgtcataggctgttgaataatgattttcatggtcgtccaatccgtgcgggttttgaaaacgggtgtttttcataccaagctgctcggctttttgattcatcatataaacaaacccatcgaggctcccaccgacatgctcagcaatcgcgacagcggcatcgtttcctgatcttagcatcaggccatacacaagatctttcagcttcactttttgaccttctgttaaataaatggcggagccttctgttctgacagcatttgccgaaaccgtcactgtttgatccattttgccggattcgatggcgaggacggcggtcataatttttgtgatgctcgcgatccgccttttttgatgctcatccttggcatataacactctgcctgacgcaccgtcaataatgatcgcgctttttgcactgacatctatagcagcatgtgctgtattcacatttacggttgcaataagaaaagaaatcatgatcacgaatactgcttttttgaaaatgcgcatgtttgctcacgtccttgtggtggtttgtacaagtttatgcgcatgtccatcagttatgaataacaattatatttctggaagcaaacataaaaaaactctccctgaaaaagggagagtaaacgttatctgattggcgccatgcttgatccggacgcttcgtaatgagccagctcttccctcatcttcagaaaggccgcgctcaacggcaataataattgctcaagcgacgcaggaacagcatgataaaactcaattgcgctgaccccggtataagacgcccggctattttcacaccacgtgtcttttttcggcataaagaactcttcaatgcattggtgatacacattataaagtgttttttccgctctggcttcctgaaaaggctcctgcatcaggagacgacggcacgcttctgcgcctccttcacaaaatactgccattcttctcagagtgctaagcacatcacagcagtatcctttttcaataggcaattcagcctgtaaggactcaagcgtcgtttgatttaggtaatcgttcacggtattgacaaccattgataagaattcgcctgttttttgagtctgcgctcgcacaatcgaatgtcccatttcgtttggtatcttcccctcatgtctttgtctctcacattttgcttctttcatgatagcttcttccttatatcttatgatgatgaaaaagcgcgattcattaaacttctattttatatcttcgaaggtttggttaaagttttcaaaaaataaatctgcttcttcttgaagaacgtcttcttccgcattttcaggcagcggcggaagctcgtccagcgttttcaggccgaattgttcaagaaaagtcggcgtagtaccgtataaaatggcccgccccggaccatcggcacgccctacttcacacaatagcgccttcgcgacaagactgtgtaaaatccgctctgattttactcctctgatttcttcaatttctgctctcgtaattggctgtttgtatgaaacaatggccagtacttctaaagatgcttgagaaaggccctttgacggcacttcaatcagttttttcaagtaaggcgcaaagtcttttttggtagagagcatgtacgtatctgcatactcaataagttcaatccctcgtgtatctccgcggtattcgtccgccacatccgccatgatcgtgttcagttcaggctcttcgatttcaagcactgttaacagctgcttttttgtaagcccttcatcgcctgccgcataaagaagggcttccacaatagctttccaattcacgatatcaagccccatgaatggattcactccccgtaatgtaaatatctgaaaaattgtgctcctgttcaatgaggaccagctgatttttcatcagctcaagaacagctagaaaggtcactactaaatgttctttttgttcatatggaaacagatccataaagttgattctcgttcctctagatttcaagctgtgcacgatttcgttcattctggcttcgattggtatgtcctgtcttgtaattgttgtttccatcggcctgtttatttttttgcgtttcagcactttttgaaaagctccgatcatatcatagaccgtgacagagagcttttgctcagactgttttacttcttttgcatattcactcaaatcactcggcggtttcgtgaacgatttttgtctttcttcttcccgttcttttaaatccttcgccgcatctttatattttcgatactcaatcagcttttcaatcagttcctcccgcggatcttcttcttcaagtaattcatcttcaaaaagctcctcctcttgcttcgggagcagcattctgcttttaatgctgagcagcgtggcagccataaccaaatactcgctggccatatcgagctcaagcacacgcatcgtatgtacatataataaatattgttcagtgatcttcgccacaggtatatcatatatgtcaatttcaagacgattgattaaatgaagcagcaggtccaatgggccctcaaacgtatcaattttcacttgatattcttccatcatctcaccattttcaagtatcactctcattgccggaaaaactggctaccctatagtataagccaccaaaaagctctcgtccaatactatttcatttcctgttttgaacaagtttgtacagaatattcaaaacacgagaggtgtttgctcggagcgcagaagcgggagaaaaagccttagcttctggttttcctttctaagaagcaatagaggccgagcgttcttttttccttttatcccttctatggtacactaaaagcacattaaaggaggaagcaccttgtatccgaaagcttatatagattatctcgttgagtttcacgcgacacgggattattttgaatgccatgaaatattagaagaatattggaaggaagatccgccaaagaaacgaaaacgctattgggtgggctttattcagcttgcagttgctttatatcatcacagaaggcagaatacagccggggcaaaaagactgatggcgaacagcatccggattcttcaagcagaacaccgggcagtcgaagacttagggcttgatcatggccgtttgctcgaacttatgcaatcggtttacgaacaaatcgaaaccggctctgcctataaaagcattatgctgccaatcaaagatgagaaactggaggaagcatgcaggatcgaatgcaggaaaaaaaagtatacatgggggcagcccagtgcactcaggaacatatttcttatcgacaaacatcgtttgcgggatcggactgacgtcatccgtgaacgtgaaaaagaaatagaacgcagaaaaaaaagcagagactgatcacagcctctgctcagcgtgtcgacaaaccctcgcattcgttgtcaagcctgtgcgttggtgctcacgaatgaaaacattcgctccgctccaatgctcagctttcctagacttcaagggttttcaatcgcgctgaaaggatgacaaaaacctaaaacaaaactgttttcggattttgtcatcaaactaaagcagaggctgatgacagcctctgcttaattattgtatgaaatgtcttgatcctgctgaccttgacaacgttcgaaaaagctctgcgttaattcatttggaaccagtacttgcgttttgaataaatgctttaaagcatccatcatctgttttccgattccttgatggcgatgagaaggattcacactgatatgccggatctcaacctcagaatcctttttttcgactccgattgctccgacgatatcctcgtcctctttccaaagaaagagctggcggtctgtatccgtttcgtagtccttaattgtctgctgaagctgcttaaggtctttttcattcggcataaacgaaagaagccccatcgcaatcttttcaaacgattttttataacgaattaacataaaaacccctctatatccaaaatgtccagtctgctattaacggatacgaataggtgatccgttttctcacattatatcattttcgccatatttttaaactgttttcagcaaattattcaaatgagcggtttaaatttgccatttcaatggcagaaacagcacaatctacacctttgttgcccgcttttgtgccggcacgctcgatagcctgttcgatgttttcagttgttacaattccaaagatgacaggtacaccagtagtgtttgctgcttgcgcgatgccttttgcagcttcattgcagacataatcgtaatgtgtcgtcgcgcctctgatgacagtgcccaatgtgataatagcatcatatttttttgtttccgccatttttttcgcagcaaacggtatttcaaatgcgcctggaacccaagccacatcaatgtcatttgtgtctacaccatgtctgagcagcgcatcttctgctccgctcagcagcttgctcgtaataaaatcattaaatcttcctactacgattccgattttaagacctgtaccaactaaatttccttgtatgatattcatatgattcccatccttttttgtgatatttgtgattagaaatgaagtaaatgacctagcttgttcattttggtttgcaaatattttttattgtgttctttcgcctccatttgaatcggcactctttctgaaatacttagtccgtagccttcaaggcctgcgatttttcgcggattattcgtcaaaagcttcatattccggacaccgaggtcgcgtaaaatttgtgctccgatgccatagttgcgaagatccggcaagaatccaagcgcctcattggcttctacggtgtcataaccttgttcctgaagcttataagcttttaatttattgattaaaccgatgcctcgtccttcttggcgcaagtacagaagcactccacggccttctgcggcaatttggttcagcgcggcgtgcagctgcggtccgcagtcacagcgatgagacccaaacacgtcacctgtgagacattctgagtgcacccggaccaataccggttcttctccgaacggcacctctcccatcacaaatgcgacatgctcttttccatctacctcatttgtgtatccataaaccttaaatgtcccaaaatcagtaggcagcgtaatgtcaacttcacgctcgacaagtgttgtcagattgtaacggtattgaatcaaatccttaatggtgatcatttttaattgatgctttttcgcaatttcaatgagctcaggcactctcgccatcgttccgtcttcattcataatttcacaaatgacgccggctcctggagatccgcaggcttcagcaagatcaacagcagcttctgtatggcccgctcttttcaggacacctccttttttcgcaatcagcggaaaaatgtgccccggacgctgaaaatcagatggcacggatgtgctgtccagcaatgcttgaacggtaaaagatctttcttgagcgctgatacctgtcttcgtttcacgatggtctatacttacggtaaatgcagtgtggtgagaatctgtattatgctccaccatagggtgaagatcaagcctgtctgcgatttcctcactgagcggcgtgcagatcagtcctctcccatgtgtcgccataaagttaatgacttccggcgttgcatgctcggcaagagccacaaagtctccttcattttctctgtcttcatcatctacaacgatgatgacttcgcctttttttaaagcgtccagtgcttcttctatcggatgaaacatgcaaatcttcctctctaaaagccgttttcgcttaagaaggcttttgtaatggtttgttgggtcttattttcattggctttatgcaaaaatcgatacatatattttccgatcatatcgcattcgatattcactttagagccgatcgttttttctgaaaagatcgtttcgctgatcgtatgcggtattaaggagatcgtcactgtgtcttctgtcaggccgaatatggttaagctcacgccatccacagtaattgatccctttaaaaccaatgtttttgttaatgacgggtccatttttaaatcatagtaaactgcgttgcttttctcttcaattcgtgtgatttccgcagttccgtcgacatggcctgagacgaaatggcctccgaaacggccgtttgccgccattgctctttccagatttactttgcttccttttgttaaatcattcagtgacgtagctttgactgtttcaggcataacatccactgtgaattgattttttgtaaaatcagtgaccgtcagacaaatgccgttcactgcaatgctgtcgccaagatgaacatcctctaaaatctttgagcatttaattgttaaggccattgaatgccctgcttttttcatggattcgattgtgcctgtttcttcgataattcctgtaaacatggtcaccatcctattcctttgtcggttttgccgtcagtttgatatcacggccgatttgggttatatcagtaaattgtaataaggggacatctttcattgattgaaaaccttcaccggagattaagctgggagcatgcgttcctccgattagtttaggggcaaaatagaagatgatttcttgaaaacagccttctttgacaaagcttccgtgaacagctgaaccgccttccacatacaccgacatgatgccttcttccgctaggatcttcaaaacatcaggaatttgaatgcgctcggtttcaagtgtaaatatgttcactccgaaagctgaaagccgttttttcttttcctcgtctgcgcgtgccgtcgtaaaaatccatgtcggcgctatttgatcgcaaatcactttagcgtcctcaggaatcgagagtacggtatcaagtatgacccgaaccggctgttttgttacattcggcagtctgcaggttaagcttggattgtcggctttcactgtgccaactccgactaaaatgctttggtgtgttttcctgtattgctgagcatcctgtcttgcagcctctgacgtgatccatttgctgtcacccgtgctggtagctatcttgccgtcaaggctggcagccgcttttagcgtgacgtacggaaggcctgtcctcataaagtgcagaaatttttcattcaggctctccgcctggtctgccaggatgccttcccttacctcaatgccggcttctttcatcatgctgatccctcttccagccacaagcggattaggatctctcatcgccacgaacactcttttgatgccagagttgataatcaattctgcacatggcggtgttttcccgtaatggctgcacggttcgagtgtaacgtaaatgtcggcaccctctgcatgtgctccagccatatggatggcatgaacttctgcatgagcttccccatattttaaatgggcgcccattccgacaatttgtccgtcctttacgacaacagcgccgacgagcggattggattcggtctgtccttcgccctgcttcgcaagatctaaggccagcttcatataatactcttccatttgtttccctcccctcttttgttatttaccgtcaaaaaagccccgaatttataaaaaattcggggctttaggtattttacgcaataggaaataacactatgcatttttgaaccatttgcatagcggttcatcatccttctcccatccagactttcactgtcggcttcagcttaaactgaatccaccgcgtgcttatgcacacgggtcacgggctctaaagcaaatgtgctttactaccgccggtcgggatttccaccctgccccgaaggatacaatctttattcatttgtccttattggctattatagcgatcctttttaaagtacgcaatgaaataaacttacaatttgagaaaaacaaaacatcacccttcgatccgaaaggtgatgttttgttaatcattcacttttgcaaccttgattaatccgtcgatccgctttgatttgctgaagtatgccttaatcttgtcaccttcttttatatcagataaatcctgatttaatttttttccgttgaagatgattttcgttccgttttctgctactccatgatactctgagccgtcaattttcgtcactttatattcctggatggtgtattcctcttcttccgaggacaaggtttgtccaattgctgtcggaacatccttcagctcaacgtcatttatgtacatataaccgcctgcaagtaaaagcaaaagcactaacagaatggtaatcttggtttttattcttcccatttctaaacctccagccaatatgaatctattcattcatatgagttattcctttttttcatgaataaaaaaccgtaaattctcgtaaattattaatataacgatgcataacgggaatatgtttcacatttctgcaaaaatttcttttctatagatatacgaatttatgttctgttttaaggggatgaccgcaaaaaagatataaaaaagcagcctctcgggaagctgcttgatcctaatttgttttgcgcatttcgttaaacgggtagaaaacaaactttgacgtacccgcaatttgttttttcgtgaagaggccaaggccgttacggctgtccatggaattgcgacgattgtcacccatcacaaaatacttgttatcaggcactttaaccgggccgaaatcatcggtcaaatggtcaaaaccgtcctgtttcgctctctttttattagccgccaaataaggttcgtccacctttttcccgttgatatagagctggtcatttttcatctcaaccgtatcgccgggaaggccgataatacgtttgacatagtgaacatcatctccgtttaacacgacgatgtctcctctatcaaactcgccgatgtatttgactgtcatattaacaaaaaccctttcacggttgtgaagtgtaggatacatagagtcaccatcaacgacatacggcgcaaaaataaagttgcggatgagcaaagcaagaacgacagcaatcacaattgcttttgcccattctaatattgactttttcttcgaaacattttctgatttcaactgatttcctccaataaacaacggtcttcaatttatgttatcacgaatcgaaaaaaaatcccattaggaccattgaagtgattttacaaactgttaatcttcatcttctacccacatcatgcctattttttcttgtcgatcataactaggcctgaaaatattgaaagaaatgaatcgcataattcagaagcgatggactcagaagaaagagagttctcatatgcaaaatctttagatcgtatataaagcatgaggttacgggcagtttgttcatttactgcattccattgatctcccagtccatgatacccatggcacttgacaaaacaattaacgtcatgaaggttactggaatgtttgcggcaacctatttcacaggtgataaccgcaccccgttttttgctttcataatatgtttaaaatcattcaagctcgaaaacatggatcagcctccaaaaaataaatccaatatattcccggcagttgaagactctttattataaaactctgaatatccgcagttcttacagtaaaccactagaaatcggttatgctgcacgtcaaacagctttgataatcccgtgccggttgtggctatttctttttgtccggcttcagtactgccgcattttatacagcctttgttgtccataccgcgatctccttttcattacatcacgtttgtttgatttattttactacaaaataccaatcccaatgaaccgtactactttaaagtttgcttaattttgatcccccgttctttacatactaattgggttcgtttctcagcttggtaaatcttctggagaaacggaaaagctccatgaccaaaacatttaaacccagccaaacaccgccgaaggcgcaacccgcagcaacatcactcggatactgctcattaacgcgtacacacgatcagcccgatgaggaataaaacgataatcatcaaaaaacgcaacagtttgcagacgagccttgtgagaatgacgaacaaaaagataagcacaaaaaccaaaaatgacaaatgccgttaacgtctgttcgctcgggaatggatataatacatgactttccaaaggagcgtgaacaggatgaagggaatgaaagagccgtctaattccctctccataaagctctcgcaccaacgactaggaaaaataagaaagagagttcgattttccggtcttgccctttgaatactgtccaaagaaaagttagaacaataactgctaacagaacatctctagacgcaaaagctttctgaattgcagctgggcccagtctatacccgatccaatacgacatgctcactcccgcacagctccccaatccggccgctaacatgcttagcacccagtttaacttttcttgaaacacgagaacaccggcaaactctcctggtccaagtaaagatagaaactctaacatcaagacaataaacaagacggcatatccgtactgttcgagcaaccccgtcaaaacttgcatgtcattctccttaaacttttttgttcttttatcattcccaatccactttttgtataatcagcacaatttcaccttcagtcgtccaacaacattgtctatggcgggatcttctctcctatactcgtcactcatacattcttttttgacataggaggagcaatagcatgaaatgggaggaaacaaaagatacacagggagtttgccaaaattttgggcagttcgttctgccaccgagtcaggtgtttgtttgcctacctcattccttggccattccccattttccccgtttgaggttcgcaatgataaagtatttcacttagtttcgtacatgaagaggtaaattctttgctcaccgaactatgatagctgcgcatgatgattactgcattgcataaccactggttatttagtgagccgtgagcaatgtatatgcactttgagtcagcacaggatgatcctattacattcgccagaaaagcagctgccgcattcagagtagttaaaagaatagacagatagctgggcttccggaaggaggcgcttttttcgagcatttttataaatcaataaaaataggcatcttctaaatatttttgccgataagtttacgctaatcaactctagcactaatacatataaacaatagaatgatatgaaaggagacttaatagtatgattgattatcctattaatataaacaacgtttccgggaacagtgtaattaacgtaggcggcgcttttatgatcaggcctttaactttgtccaaatctgtgtttggctccggaggtttaaatacaggaattgtctttgaaaataactttgtaagcaaggctaaaatgattaatcatcaatttactgatcaaaacgtcaccaaaactttttaatctattcattacgggggcttgcgatgtctcactaactaaacacctggttttgccaaccgccatcagcactcggcggttttttattgaacatttttacccaataaaaaagctccctctatatgaggaagccttttgcctgccaattagccttctacgcgaacttctttcatgacatcgccgttagacatgtttttcgcgaattctaatccgcttgttactttaccgaatacagtgtgaacaccgttcaaatgaggctgtggctcatgaacgatgaaaaattggctgccgccagtgtcttttccggcatgtgccatagaaagtgcgcccgcctcatgtgtatgcgggtttccttctgtttcacatttgattgtgtatcccggaccgccagtaccagttccgtgcgggcagccgccttggctgacgaagccaggaatcactcggtggaatgtaagcccgtcataaaagccttcgttcgcaagcttttcaaagtttgcaacagttccaggtgcagcttcaggataaagttcaaattcgattttgttcccgtcttctaataaaaagtaacctgttttcaattgtatgcctactttctttattttaattttcaaaggagattatgtatgataggttatagcctgtctctccttgtcgcggctattataccacacctttcgggggaaaacgaatctcccgggctttactaaaaaataaaaatgaaacctgaatctctttatctccgtctaacctaacggaactgtatttttcatgattcaggtcctcacaaagcagcactatccagctgcttgtgaaattgaaggaggtcaaactgctttgaagaaaatttggattggaatgctggcagcggccgttttgctgctgacggttccgaaggtcagtctcgcggatgccgcagttggagatgtcattgtaacactgggtgctgatttgtcagaatccgacaaacaaaaagtgcttgatgaaatgaatgtccctgataatgccacaacggtaaccgtgaccaataaggaagaacatgaatatttaggaaaatatatatcgaacgcgcaaatcggatcgagagcgatttcttcatcgtcaatcaccattgccaaaaaaggctccggattgaatgttgagacccataatatcagcggcatcacagatgaaatgtacctgaatgcactgatgacagccggtgttaaagatgcgaaggtgtatgttacagcaccgtttgaagtatccgggactgcggctttaactggattgattaaggcgtatgaagtttcttcagacgaagcgatctcggaggatgttaaacaagtcgccaaccaagagcttgtcacgacatcagagcttggagacaaaatcggtaacgaaaatgcatcagccctgattgcaaaaatcaaagaagagtttgctaaaaacggggtgcctgataataaagctgacatcgaaaaacaagtggacgacgcagcttctgatttaaatgtcacgcttacagacagccaaaagaatcagcttgtctccctattcaataagatgaaaaatgctgacattgactggggacaggtcagtgaccagcttgataaagcgaaagataagattacgaaattcatagaatcagatgaaggcaaaaacttcatccagaaagtcattgatttcttcgtatctatctggaatgcgattgtatctatattcaaataggaaaagcgccgaaaaatcggcgctttcttttattgctttacacccgttttaaatggcagatcaagttttacaatatcttcgtatgtttctcgcttcacgactaaatgagcctcaccgttttcgacaaatacaacggcgggtctcggaatacggttataattgttggccatgctgtatccataagcgcctgtacaaaaaacggcaagaagatcgccttcttttacttccggcaggtcaatatcccaaatcagcatatctccgctttcacagcactttccggcaattgataccgttttgtcatgcgcttctccgatcctgttggctgccgcagcttcatatttagcttggtaaagcgcaggacgaatattgtcgttcatgcctccgtctacagccacatattggcggacacccggcacttctttttgagagccaatcgtataaagagttgtgcctgcgtctcctacgagagaacggcccggttcgatccaaatttccgggatgtcaaaaccgtaacgggaagcattttctttcacagcttcgataattttttcaacgtattcagtggcatgaagcggttcatcatcttccgtataacgaatgccgaaacctcctccaagattcagcaccttggatacaaatgaatatgaatctctccattcgtctagttttttgaagattttttccgctgctaacacaaaaccggccgtatcaaagatttgcgagccgatatggcaatggacacccagcagctgaatgtgttccgattgtaatacttgttcaatggcccgttcagtttgtccgttatgaagatcgaaaccaaactttgaatcttcctggcccgttgtaatgtagtcatgcgtatgcgcttctactccgggcgtgatccgaagaagaacatcgatggagtgacccgtttctttacataggtcttcaagaagcgcaatttcatagaaattatccaccacaatgcagccgatgcggtgctcaagcgccatgcgcagttcttccctgctcttattgtttccatgaaagtggatgcgttctgccggaaagcctgccgcaacagccgtatatagctctcctccggatacgacatctaaagaaagtccctcttcctcagcgagctgaatcattgcgactgatgagaatgctttgctcgcatatgccacctgtgctttcagccctgcagaaataaacgcctgtttaaagcttttagcacgctcacgtattaaagccacatcatatacgtaaagaggtgtaccatatttctccgctaaatagagagcatccacacctccgatttctaaatgaccatgttgattttgtctgcttgtgccgtgtaagaacaatgtcattccctctttctccgcttatggatgaaaggacagttttatggactgtcccttcataattaagacatacattatcatactcttcagtcagtttcaatgcgattatgaattggtaggctgtcttaagcgatttttggggtgaacgatactgggtcttacttttgcgccaggtttcgctgtgcggacaagaacctgccacagcgcctttccgttaaagggaatcagcggccataagtacggtgtctgaagggatttgatgcttgtcatggcaataattagcactgtaaatccgatgacgagcccttttatatgaaataaagcaacgagtatcatgaggacaagacggctcattttgtttgccaagcttaattcataactaggcgtcgtaaaggttccaatcgccgcaagtgagacgtacagaatcacctcaggagaaaaaaggccgacctcaatcgcaatctgcccgatcagaacagcggcaattaaacccattgctgtcgataaagccgtcggtgtgtgaatggcagccattctgagaaactcgattcctaagtcagctaaaaatatctgcaggatgatcgggatatgcgtatctttatttaaaccgataaatttcatgttgtccgggagcagatcaggctgaagcacaaagagaaaccagatcggaagaaataaagtagaagcaagaataccgaaaaatcttacccatcttaaaaaggtcccgactgaaggcgcctgcctatattcttcagcatgctgcacatggtgaaataaagtcgtcggggtaatgatcacactcggcgatgtgtccactataatgataacatggccttctagaacatgatttgcggccacatccggtctttctgtatagcgcacgagcggaaaaggattatagctttgattaacaatgaattcctcgacagttttgtctgccattgttaatccatcgacatcaatggatgcaatttctttttctacgatctcaaccagatccggatcagctatatcttctatataacaaatgcttaaatccgtctttgaccgctcaccaactttcgtcatcttgactcgaaggcgttcgtctctgatccgccttctgagaagggccgtattgacgacgatattttcaacaaatccgtctctggctcccctgactaccttttccgtatcaggttcttccgggtttctgcccggatagcttctgacgtcaattataaatgcgaaacctgcaccttcaacaatgacagcgacgagcccggacagcacttggtcggtggtttcatccaatgtttttactttttcgacctgggcgttcagcagcctgttttcgacgatgtcgaccagctcatcagggtcttctttccgattgttaatggcaacaagttctctcattaaatgaataatataggctgtatcgcataatccatttagatagtaaagctggatctctttatctaaaatcgtgagcttgcgaacacctacatcatagctcgtccccatcccgacacggtttttgaaatactcttcatttttagctggattccgataaacccgaattttctcttccttgtggtccggcatgatacccgctcctttctaaaataaactcgaccgctttcatggtgattggcgacccttttgagatatcgtcttttctgcccattttgccgatatccccgataccaacaataagcgggagatcaagtttatcaaggcaatagactgtatctccactcattctgtggtcatcaaattccctttccccgactttatcgacgccgtattcagttatttctccattgcggtcaatgcttacatcgaccctggtccattcagcctgatgtgtttttgacgcgaccgcaatcacaccgagcacttcaatagacggatgggttgcgacataggtcagagcggcttctcccggaccctctccttgaaggccggagtcgtcaaacatgacaaatacaggatcatacggtgctgaggcgatcagcttgacaagctcggcgccgctgcgggtggaaggattcccttttgattgtgaaatacatcgacctcccactttgcttgcggcgtattcaattgttttagcggcataaacatccccgtctgttaccagtatgaccttgcgttttgtcgtcatgtcggcattatcctttcggtttgaaaataacagctacgataaaggcgaaaagaatagcggctgagataccggccgaggtcagctcaaaaatccccatgccgattcctataaatccgtgtatatgcgcctgatgcatagcaccgtgcagaagactgtgaccgaagctgacgatcggaacggtggcgcctcctccggcaaattcaataaatttatcgtaaatgccgaaaccatctaatattgcaccgattacaacaaatgatgtcatgacatgagctggcgtcaatttaaaaatatccaagagcagctggccgacgatacaaatggccccgccgcatacaaaagccaaaaggtagtccatgttaagatgcacctcctgcacgctcaaatacaaccccgtgggcgatagtcgggatggtttctttttgctggatcatcgtcgggcttaacagcgccccggtcgccacgacaaatacacggtttaattttccttctctcagctgcttaaaaatatgagagtaggtgacaaccgctgaacaagcacagccactcccccggcaaagacctgctgatccggagtgtaaatcagaagcccgcaatcatcatgctttgtgccgactggatatccatcttcttttaagatgtcttttacgattggagaaccgacgcctgacaggtcacctgtcaggattagatcatagtcatccgctgtccggttgagatctttaaagtgctgcttaatcgtatcagctgcagccggagccatagccgatcccatatcaaaaggatctgtaatccctaaatcagaaacctttccgacagtcgcacttgtgatttggatatcacccggtgtctgactgatgacaactgcaccgcttccggttacagtggaggtagcagtgtccggtttttggcctccgtattctgtcggatagcgaaactgtctttccgcagttgcattgtgactgctggtggcagcaagtgcccttttggcaaacccgccatcaactaaggctgatgcgacagccactgtttccattgatgttgaacaggcgccaaacatacaaagaaatgggattttcaagtgtcttgccacatagttagccgtcacgttttggttcagcaagtcgcctgccagcaataggtcaatatcatcttttgtcagattgtttttttgaagcgcaacattaacagcgtcttccatcagctggcgttccgccatttcccagcttttttgattacaatgcatttcgtcataggttttatcaaataacgagccgagcggtccgtctttttcctttggtcctgctgccgttcccgctgagttgacaaatatgggatgttcaaatacccaggtttgctttcctgttaatttcattttcttctcctcctatgacatcagtttctcaaaagcaaaccgaatcattccaacgatgtatgcagctacaactccgaaaacaataacatttcctgccagtttaaacatatttgtcgctactccaagcactaatccttcacttttatattcaagagccgcgcttgccatactgttggcaaaacctgtgacaggtacggctgaacctgcgcctgcgaattgtccgattctgtcatagatgccgaaccctgtaagcagggcggaaattaatatcagcgttgcagctgttggattccccgcagttttttcattgaaatcaaaaaaatgaatataaaaattttgcagaccttgcccgattgcacaaatcagtccgcccactaaaaaggcttttacacagttccagacgtaaggcggcttaggctgatatgttttcacttttgatttgtaattttcttttatgtttgtcatcttgaaacctccttatgaatggtcaataaagtacagccaatgaaataaggatcccgcgattttcccaatcacgatggccattaacagaataatgattttacttctgagcccgattcgttttgccaaaatcggcaggacatttaaaacctctgtaagagcagccgctagcatcccgacgaacaaacctgccagaagcccgaccggcacagctatccattttgttagataaagatgattcatatgaagcgtctcccatcccccgcaaaccgcgccaagaataacagccgcttcataagcctgaacaaatctcattgttttggtgagctgcatcagccgcggaatgattcccattacggttaaaaaagcaacgaaacccgcccccaccgttatgcctccgccgagcccgacaaaaataatgaacaatacactaacgatcatgcagatcctttatggtttcttgattctcatgcatggccacatattgatcgagatcaagctgatagttaaacatctcaacctccagcgggctgggctcttcatttaggcgctttttaaatatgtggttaaaaaacacgatcatccccagtcccaaaccgatgctgtatgggatttgaagcaaatatggatagtcattcctctctccggttatgatttcatatagtgcgatatgaacatctctcatgcttacatcctcatgaaagttcatgatggcaagacacgatccaataaacagaagcagccagacaccgataaatagaaccgttgataaatttcgctttcgatattgaatttcaacaatggtttctgctccgcctacggtttgaacatcaagtgtcggatcttgtaaatgaatggctctgaggacttgtatgatatccagaattacgatatttttatctttttcgctcacctgataaagcggcatagccgaaagtttctttttcagctgaagctgcccttctatttgcgcggcatctccaacggtaataatatcccctggatgtgccagcacccggtggcgaagccggataaatattcgtcgttccatcattgatcaccatctttcggtggttatatatgtagtatgtggttcgattttgttctcattcatccgctcgaaaagaccataaattaccacgcttttgcacataaaaaagctagcctgcactgcagactagccatccgtatgatccatttgaaccttgatctgttttaatattttcttttcaagcctggaaacctgcacctgagagatcccgagccgctcagccacctcggactgtgtctggtctttataatatctgagatagacgattagtttttccctttcctccaaatcgctgattgcttctttcagcgcaattttgtcaaaccatttttcttctgagttgtcagcgatttgatcaagcagggtaatcggatctccgtcattttcataaacggtttcgtgaatcgaagatggagcccttaccgcctcttgggccagtacaacatcctcagcttcaatctccaaatggtcagcgatctcctgcaccgtcggcactctgcccagtgttttcgaaagctcatccttcgcgcgccggattttgtttccaagctcttttaatgatcgtgatacctttacagttccgtcatcacggataaatcgctggatttctccgataatcatcggcactgcatacgttgaaaaacgcacatcataggttaaatcaaatttgtcaacagattttaacagcccgatgcagccgatctggaagagatcgtcaggctcatatcctctgtttaaaaaccgctgtacgacagaccaaacaagacgcatgtttttttctatgaggaggtctcttgcctgctggtcgccattttggctttgtttgattaattcctttacttcatgatccttcagctgagcgtttttgccgtttttcttaacctccacatccataacaaatctccttaattacaaagcgctttgctttttgataagtgctttgttaagcgaatcgttgttcccatttcaggcgatgaatcgatactgacatcatccatgaaattttccataatggtaaagcccattccagagcgctcaagctcaggcttagtcgtaaatagaggctgacgggcttcttcaagatctgtaatgcctaagccttcatcacgaatagtcatatatacgacatgatcttccagcgtcactgaaatgtaaactttcccttcacagttctcttcatatccatggataattgcatttgtgactgcctctgacacgactgttttgatttcagtcagttcatccattgtcgggtccagctgagctataaatgaagcaactgtcacacgggcgaacgattcattctgactgagggcagaaaactcaaggtgcatttcatttttcatgatgccacccccagtgtcaggagcgcctgctgttcagattgttcaaatcggataattttaaacagacccgacatatcaaacaatcgcttcaccgcaggagagatagcgcaaacaaccatttctccgccaatttgcttaatttgcttgtatcttcctaaaataacgccaagccccgagctgtccataaaggaaaggtcctccaagttcagcacgatatggcgaatatcatccttctccaatgattgagtcactttttgcttcagggtttcagccgtatggtgatcgagttcgcctgttaatcgaatacaaagcacagattctttgacattcatgtcaattccaaggctcatgctcattcctccttgatatgatcggataatgagtgtttcgatttcgacggaatgaattccttcaccgtgacaaaactagtggtcattcggcataattacttaaattttgtccagtctcccatcgtccgctttaagaatgtgataaacccggctttcttcatatcttcttttgcagcaacaggactttcagcgagtacttctccatcctttttcagaacaagagtgccaagctcttggcctttttgaatcggagcactaatattgtccttcatcttgatttcttttttcacatcgttcatatcctcgccttttttcgtcaatattgaaatcggctcagatgtagtgagttcgatcaatttttgtttcccttttttgacctttacttttgctactgtttgatttcgtttatataaaggatgcgtttcatattgactaaaggcgaagtcaagcatttttgtcacttgcgcgtttctttctttaggcgtgctcgctccgaatacaaccgctatggcccgcatgtttccttttttagccgaagcagtcagacaatatttcgcttcgcctgtatagcctgtttttacgccgtctacaccaggataaaatttgataaggcgatttgtatttacaagccaaaactttttatctgtattttcacgcagataatcttcatacgtgccggtaaacttcgtaattgattcgtatttcaataattccttagccatgattgccatgtcataagcagagctgtagtgtccttcctcggtcagtcctgttgggtttttaaaggatgtatttttcaatcccagctcttttgcttttttgttcattttcttcacaaattcttcttcagagccggaaataaattcagccatggcgacggaagcgtcatttcccgaagcgattgcgatgcctttcagcatttctttgacagtcatttcttcgccgggctcaaggaatatctgtgagccgcccattgacgccgcatgctcgcttgtacggactttatcactcattttgattttgcctttatctaaagcttccataatcaaaagcatcgtcataattttcgtcatgcttgcaggcgccagtctctcattgctgttcttgttgtaaagcacttttcctgtgtcacgttctatcagcaccgcagacttcgcttcatgagcaagctccgatgtacgttttccgtcttgttttgcaaatgcagacggtgcaaatgtaagcagcattataccaatcaacaaagtggataaaagacgtttcatctcaaaagccctccatttcataatcctttttattttttccaagcgggatggttttatacgccactgatggaaaatgtttcgaattttgggcgtaaaaaaagacagctgtgtgatatcagacacagctgtcttttggtcctgcattgattcatttttattcgtactgagcgacgatcgctttaacaagctttaagaatccagcttttactttttcggtcacttccataacttcatcgtgacttaaaggctgatccagaattccggctgccgcgttagagatgcaggaaatgccaagaacccgcattcccgcatgattcgctacaatgacttccggaacagtagacatgccgactgcatcagagcccatcgttcttaagaaccggacttctgccggtgtttcgtaagaaggtcctgtcacagcagtgtacacgcctttttgaattgggatattaaggtctttcgcaatcttttcagccaggctggacagatctttgtcataggctgaagacatatctggaaatctggcgccgaaatctgcttcgtttggcccgattaacgggtttgttcccataaagttgatatgatcggtaataatcattaagtctcccgcacggaattcagtgttgacaccgcctgcggcatttgtcacgatcaacgcttccacaccgagcgctttcatcacgcgtacagggaatgtgactttctccattgagtagccttcataaaaatgaaagcggccctgcattgcaatgacggaaactccttcaagagtgccaagcacaagctgtccggcatgcccttcaacagtagataccgggaattcaggtatatcttcatatttcagcttgaccggattttcaatttcgtccgccaaaatgccaagacctgagcctaaaataaggccgatcttcggagattccggcaggttttgtttaataaaagcggctgcgcgttcaattctgtccttcaagaaacagtccccctattgtaataaagataaaaagcttttcccgtatttcggtttattcgtttggaaattatcagcgatcgttgcaccgatatcagcaaatgtatctgcaagcggcagcatttgcgctttcttatgttttttgctgtaagcgagaatcggcacatactcgcgtgtatggtcagtcccatgatgaatcggatcattgccgtggtcggctgtaataattaacagatcgtcttctctcattttttcaaacacttccggaagccgcgcatcaaattcttcaagcgcgcgtccgtagccttcagggtcacggcggtgtccgaataacgcgtcaaaatcaacaaggttcgcaaagctcagacccgtaaagtcttctcccagcgtatcgatcaccttgtccattccgtccatattagaaaccgttctgcgtgaagaagtaatgccttctccgtcgtaaatatcagagatttttccgattgaaatcacatctaagccgctgtctttcaattcattcatgacagtgcgatcaaacggcttcagcgcataatcatggcggtttggcgtccgtttgaattgacccggctctccgacgaacggccgtgcaataatgcggccaaccatatatttcggatcaagcgtcagttctctcgccgtttcgcaaatgcgatacagctcctcaagcggcacaacctcttcgtgagcggcaatttgcagaacagagtcagcagacgtgtaaacaattaaagcccctgtctccatgtgctcctggccaagctcatccaaaatcgctgtgccggaagccggcttgtttccaataattttgcggccagatctcttttccagctcttgaagcaattcatcaggaaagccttccgggaacactttaaacggtttatcaatgtataaacccataatctcccaatggccggtcatcgtatctttgccgtttgacgcttcttgcatttttccataataggcaagcggatgttctgttttttctacacctttgatatcttcgataagaccaaggccgagctttgccatattcggcatatgtaatccgttcatatgctcggcaatatgaccgagcgtatgagcgccttcgtcattaaagtcagcggcatccggcgcttcgccgattccgactgagtccatcacaattaaaaacacacgattatatttgtatgcaggcatcttgaaagcctcctttttttctatacgtctattgtatcgctaagaggtctgacaactcaagtataaaccgttttcattcccgttgacaatgtatttggaaataatgagaaacttcaatattttctgtcgctctaaacaaaaaagccgcagccacctgcggctatgctcgcggatgaaactgcttgtacacatccttcagccttgttttcgtcacatgcgtataaatttgcgtcgtggatatatccgcatgcccgagcatttcctgcaccgctcttaaatctgccccgttctcaagcagatgcgtcgcaaaggaatgcctgagcgtatgcggagtcagctctttcttaatgccggcttccaacgcgatttttttcaggttcttccaaaatccctggcggctgatctgtttgccgtgatgatttaaaaagagggcgtcagacacattgttctttaacagttttcccctggcttttgtcatatattcctcaatggcggaagcggcggcttcaccaattggcacaatccgttcttttcttcctttgccaaagcatcggataaaccccatagataaatgaacatctgccgttttcaactcaatcatttcactgactcgtatgcctgtcgcataaagcagctccagcattgctttatcccgatagccgaatgggctcgtcagcttaggcgtgtccaataaccgctcgacttcattgagtgcgagcaccttcggaagcgcccgttccgtcttttgtgtttcgatatgaacggaagggtccttatccgttactttttccctgagcagaaattgatgaaaagagcgaatggatgccaaatgccgcgccgatgtcttaccggatttccccgagtccttcaaatactttaagtattggataatatgtatgcgggtaacgtggttccaatccgtcacatgaagggtttctgttaagtagagagaatagcttttcaagtcacgttcataggatacgatcgtattttgagagagccctctctctaccatgacgtagtggatgaaatcctttatttgatctttcactcttgatctactccccgttttggtaaaaaaagatcaaccggtcgagccatccgcctttttcatcctgatccatttcaacaacttttacagcggagccttccggtttatcataccgatgatagttttcatactcttgattcacccatatcatagcataatagaacaaagcggtaaaaccggtaaacaggatgaaaactttcaatgcatcgacagctgttttcaggaatcttcccatgtcctaatcgatcctttcctatggttccagttatataaaccatatgccaaatcagaaaggttttatacatagaaacagcaaaaaaccctttccccatgagaaaaggttcgcgctcggcaccatctattcagtttcttttccattacagcggtggcaaatgccgtgaaacgtcaatctatgatctttaatcttaaatttccaatcacgttcaatgatttcttccacgtcttcaagcaaatcttcttcaatttcatcaacggctccgcactccatgcacaccaagtggtgatgaaagtgagctgcgccctctttccgaaggtcgtaacgggacacgccgtctccaaagttaattttatctacgacttttaattcagttaataattcaagcgtacggtatactgtagcgagaccgatctcaggagatttctcttttacgaggaggtatacatcttctgcgcttaaatggtcttcttcgttttcaagcagcactcttactgtcgcttcacgctgtggcgtaagtttatagctggatgagtgcagttgtttcttaattcgatcaatacggttttccatgtctttccctcctacgccgcattccatgactcattataacaaaatacgcgcagagttccaactataattattataaactgataaataaaacggttttcttttaataataattttaaaaaagtctagatgtaagcttttccattaaaacaggagataagtatgcttcaaacagagatgagatcagcgctaaaaacagaatgaccagcagcacaaaggcataccgcccgaaccattgaatcggcgcgtcatgcaggcttcgtttcacgaacagctgtctgattaactttaaagaaaacgcaattgcacatgtgcccataatgagataagccggaatcagcagcacattttgcggcaaaacggcgacaaatgataggaaaaacccgcttactcccatctgattgactaggaacccgacagtaaagccgacgacgatccctttcagaaagatcataatgaaaataatcggcatcccaatgacggaaattccgagtatccacatcaggcctaaatactttgcattatgaaagatactttgcccaaacatatcagctgaacttgcctgttttccatccgaaagctgtccaaaaaattgacttaagtagtagtataaatcttctttctggctgatggtcatactgttgacaataatcgcgccaaagatgacacccatgaaaaacagcactgacacaaatatataaagagagagatgatctttgacatgcctgagaaacatgtccttataagagatttttcgcataccgtttcctcccgcccgttctagtgatttgatttaatagattgtatgaaagaaacggaaaaacatgccctttttcaaaaagaaacgatagagatgaatgctaggcggctttttggggcacaaaaaaatccttatcatcaactgctgtatgatcataaggattcttatgcttccgtttattcaaaatctcttttttgctttttgtcattctttcatgtgtgctgaaagatggtgtgctgcctcttgataataagacgtcacgtccgccgtttctcaatcgatgcccccgcttctttttcgcttggctttttgccatgtgatcactcccttttttattttcatagtaatgataacaaaattgaacaatgataagaaaaaaacagcacctgctacgacaggtgctgtttagctacatttatttcactgctgtaagagctgcatgctcgacagctgctgctaccgcatgatggacttttgaatcaagcggctgagggacaacatcaccttgtttagtgcaagctgcgatggcctctgctgctgcgacaagcatatcatgattaatctccgtgctttttgcgttaagcgctcctctaaaaatccccggaaaaccgagtacattattaacagaacgcccgtcagctgcatatgcggcgccagcctgcagcgcggcctccggttcaatttccggcttcggattcgataaagccaaaatcacttgaccagaacgtacaaatgccggttttattaaacccggaacgcccgttgtagcaatgacaatatcacatgtttccatgagctcctcaatactggaaactgcctgtccgccgtattgttcgagacgattcattgctgactctgatttgtctgttccgtacacagcattcacaccataagccatgaacatccggcagatggccacgcctgctgcgccaaggccgatttgccccactttcgcttccttcaggtcaacccccgcactcctgcatgccgaaatggcagctgccagcgtcactacagctgtaccatgctggtcatcgtgcataacagggatgttcagctcctcttttaggcgatcctcgatttcaaaacaatgcggcgaaccgatatcctcaagaaggatgccgctaaagcccggagaaatatgttttactgttttgatgatttcttcaggatcactcgtatcaagcagtatcggaatgccgctaatacccgccagctgatcaaacaaagcagcctttccttccatgacaggcatgccagccacagagccgatattcccaaggcctaaaattgcggttccatccgttacaattgcaacagaattgctgatcgttgtataaatagaagctttttcaggttctttttcgatcagtcggcacacgtccgcaacacctggtgtgtagacacgtcccagctctgccagtgaacggatcggcattttgcttttcatttggatttttccgccttcatgtgcggacaggacttcatcagatacggtgtgaagcctgatcccttctccgagggcctgtacagccgcgatcacttcctgaagctgttcttcattctccacttgaacggtaatattccgcattgtgtaattgggtccgacttttaccgtctccacttcaccaatatccccgcccagaaggccgatggccgtagccacccttccaagatttccgggaaccgaaggcgtttcgatcatcagtgtccgaatcatgtgtttcgctatcattcagtgatcctcccctattagcctagtttttcggctttaactgtattgtttttcgtataccatataaattttcctgtataaccatagataattgcaagacctattgctacaaaactgagccacataaacggcagataagagaaggtagaaacacctaaaataccagccatgtaaatcccattatcagaccaaggaaccatccccgaagtcaatgttcccccgacctctgagttacgtgataacactcttctgtccagatgtaagcgatcatagctgtcttccataattttcggagtcaaaataagagatacatacatcgcacagccgaagatgtttgctaaaaacgctacgatcagtgtagacaatgtgacattgccggctgaagttaatttcttttcaaacgttgaaacaatgacttttaacacgccgagtttctcaagcagaccgccaaaaccaaggccaaagatgatgacgacgagagaatcaagcataccgacaattccaccgcggtttaacaagccgttcaaaaattcaacatccgttttaatagagaagccgttgtacgcagttgcaatcgcatgggcaatatccattccttggaaaacaacagcccagattgcaccgagtaaagcgccaattacgataaccggcatagatggctttttcatcgccaataagactatgacgagaactgccgggatcagcatccaaatatgaatgtcaaacgtgttttgcaaagatgattttaagaattcaactttatcaagatcaatatttttcccgccgtacataaatccaacaactgtaaagagtatagctgtaatgacataagcaggtattgataaataaagcattgctctcacgtgagccaatacatcgacttttgatagtgaagaagctagaactgtactgtcagacagcggagacagcttgtccccaaaataagcacctgaaagaatagctcccgctactagaggaagcggaatgcctaacccctctccaattgcgatcatggcaatgccggcagttccgactgttccccatgacgttcctgttgccacagacataatggaacaaataattaacgttgccagtaaaaagatacttgggtgaataaattccagtccgtaataaatcaaagtcggcacaacgcctccggcaatccatgttccgatgagcgccccaactgaaacgagaatcagtacggcttcaaggccatttgatatcccatgtacaatcgcattttgtaaatctttataagaataaccgagtctaatacctaaaagcattgcaataaaccatgaaacaaaaagcgccagctgtatcggcaagtcgagaaagactgtaaacgatagaacaagtgctaaaaatactcctagtacaataataatttcaaatagtgttggcaatcttacatccttcaaaagaagtcccccttcatgtaaaagctaaaacgctttcaatatatagtgcaacacgtatactatacttcctcatccctatgttgtaaacagcttattcatccgactattcggagatgaataagctgtattttatacaaattttatttttctaatagttctttccctgcgatacctggtttggtcatctcatatgggtttaaaataatatccaattcttcttctgtcagcacatcatgctgcaggcaaaggtcacggactgattggcctgtcataatcgcttccctggcaattctggcagccgcttcatatccaagatgcggattgacagctgtgatcacgcctgcgcttttttctacgtattgcttcaaccgcttttcgttggcttcaatgccttttaagcagttgtcagtgaacgaacggaagccgttgttcatgatgctgatggattgaagcaaattaaagacaagcacgggctccatgacgttcaactcaagctggccggcttctgaagcaaggcagattgtattgtcgtttccgataacctggaacgcaatttggttgatcagctccgccataactggattgactttccccggcataatagatgaacccggctgacgtgcaggcagagaaatttccgcaagtccggcgcgcggtcccgacgccattaagcgcaggtcgtttgcgatcttcgacatgttcatcatgcagacttttaatgaagctgatacctctgtataggcatctgtattttgtgttgcatcaacaagatggtcagcgccgacaagaggaagcccgctaatatcagcaaggtgctttactacctgtttgatatattcaggatcagcgttcagccctgtaccaacagcagttgcgcccatgttgacttcatacaggtgctggcgcgattgcttgattcgtttgatatcacgctcgagaacacggctgtaagcttcgaattcctggccaagacggatcggaaccgcatcttgaaggtgtgtccggcccattttaataacagagtcaaactcctgtgctttttgcttaaacacactatgcatatcttccattgttttcagcagtttttccaagagcttcaatgtggaaatatgaatagcagtcgggaacacatcgttcgtagactgtgacatgttcacatgtgtgtttggacttaaatggatataatctccctttttatggcccatgatttcaagcgcccggtttccgataacctcattcgcgttcatgttcatagaagttccggcaccgccctgaatcggatcgacgataaactgatcgtgccacttgccttccagaatctcgtcagcggcttgtacgatagcttggccaattccttcatacagccgtttcacgtccatgttggcaagagccgcagcttttttcacaatcgccagtgcgttaatcatttcctcatggattttgtatcctgtgatcgggaaattttcagaagcacggagcgtctgaattccgtaataaacatctgcctcaatttgtttttctccaaggaagtctttttccacgcgatattctttttggccgtttaacataatctttaaccttctttctctttgctggttatcgtttttacattttacaggacaacgtcatcagcaatcggtgtttccataattctcttgacgacaggaagatccgaagactgacctagtgcccacatcaattttggcacaattgcttctgtgttcatatttcttgatcggataattaagtcttggttgaccctgcggccaacttcgtaaatgctcatgtcttcgccttcttcaagacattgagtcgtaatgacgacgacaatgccgctttcgatcagttcattcacttttgacaaaatgtctctgccttcaaacggcacccctccgctgccataactctcaatgacaatccctttgtacatgcttttcagggcatcaaacatttcaggctttaagcctggatgcagcttcagcagacatacatctgtgcatagtgaagtgtcaactgtgaaggtgtcgttctcaggttccgttacttgtttgttgtattcgatcccgtcttcattgataaaagcgatatatgggtaattgatgctttcaaatgcgtcgtagcttttcgttcttaatttgatcgcacgcgttccctgaatgactctgccgtcaaacacaacataaacgccgcccacgccttcacaggcaaatcgaatggcatctgtaatattttttttggcatcggttttttggaacgtgatcggaatctgcgagccggtgatgacaatcggctttttggcatgctgcagcatatacgatagtgcggcagatgtataggccattgtatctgtaccgtgagtaataacaaacccgtcataggcatcataattttccttaacggcttctgctatttccacccagtattcaggctgcatattggtgctgtctatattcataagcgactgagtttccattgtgtaatcgttatcaagttttgatacgtaacttaataattcatcagccttgactccgggagccagcccattttccccttcaactgaagcaatcgttcccccagttgtcaacatcaataattttttcataccatgcacctcttcactgtatctaaagatgggttgcgagaaggtattcgcttttcgcatacttttaatgcaattatagacacggaaaataaaatacgcaagacattattattcaattcgcgtacacttcctaatacctatatgatataatcagctcaaggtgaaaaaggagcggaagttcatgaatctagatcgtttaactgaattgagaaaaaagaaaaattggtcgcttcaatatacagctgaccttctcggtatcgcaaaaagcacatatgccggctacgagtcaggctaccgacggccttcacttgaagcgcttgccatgctggctgacctctttgacacaacctgcgatgaacttttaggccgcgagaaacaaaagcagactgctcctcaggccatagaattggccacgtggagcagccttgactttaccatttctgttgatggccagccgctgagtgaagatgaaatcatccagctgattacctttatacgcacaaaaagaaaagtacaggaggaactgagttaatctttagctcacggtttaattttaccgtaggttcctcctcctccggctttcaattccagttttccggatctcgcttttacgataagcgccgcagttttcggcgggacaatgcgagccaaatcttcttctgcagcctcatgaagaacagccatttctgttccgaaggctttttttagtttgtccagcgttttcgggcctacacccggaacaaattgcagcgggatctgatgtacatatcgcggacgcgggacgcgaacttcaagctgatcactcaattcacgcaatctttcgctgactcccttggtaaatctggcatttccgcaattcgcgcacgctgtttccccgcttacagcaggctctccgcacgcttcgcaagcggtctgataatatttccccaataacgggtccaagccataatttgcgataattttcctgtcatcttgtccctttaatgcaagagcaaattcagtaaaatcagctgactgcacatatagttcattatattctctgccgattttccccaacgaatgcgcatcagaatttgttaaaaaaggatacggattcaattcagatacctgtgatgccatgtctgtatcacagcttaatccaagctccaccgcgtctatcatagatggatcaaaaacctcagttaagcttgatttaaccccttttccatataagcttttatgcggcgtaaagatatgggcggggataaacaagccgcccatatcctgcacttttttttgcaggtttaagcccgtttcataaatccgctgcgagcttaaatgaatatttttcagccgggctgacagccagtttgaaaactgtttcatatcagccagcgtcggcataaatacgagcacatggatcggtccgctacaggcttcatcataaatctccagctcgctccccaataaaagagtcgtgctgcgataacggattcctcccccgtcaagctcgcgatattttccagatgaaatgccttcctcaagctctagaatgacttccggagaatgacagtcgataatgccgaggagttcaattcctttatgttcactggcttcaaccaaaattctgtccagtgttaatgttttagcgcctgttattttgacagcccttcctgtaaaggtccggccgatatgaatgtgcaaatccgcgtaaatctttttcatttttgtgcttggagcgcttctttcagctgaagatactgaatcgcgtaggctgttttagcatcgtatacttcacgcgattcaaccagctttagcgcatcttcaagcgtcacctccatcacttcaacaaactcgtcctcatcaagctcccgtttttcttcaagcacagaaagctcctcagcaagaaaaacgtgaacgatttcatctgcaaatccgggtgatgtataaaacgcagttatttttgtcagtttttttgctgtataaccggtttcctcttcaagttcccgaagtgccgtatactccggctcctcacctttttcaagcttaccggccggaatttcaacgatcgtccgctcaagcggcttacggaattgtttgaccaggatgattttcccttcatctgtgacggctagtaccgctactgctccagggtgtttcacaatttcacgtttactggctttgccgtttggcagctctacatcctcgacataaagatcaatgactttacccgaaaagatctgttctttggcaattgttttttcttctaatgatttcatttcttcatctcccgttctgtctctatatgatgccccatacattttatcatactagagcaaaagggggcttcttcgtgaaagtgcaccgcatgccaaaaggtgttgtcttagtcggaaaagcatgggaaattcgggcgaagttaaaagagtatggacgcacatttcaatatgttaaagattggatctcaaagccataaaagttgaaactttagctcctttatattacggtcaatacaaagcctaaaaaaggagtgtgcacatgagaaagcgcaaattgggtacatctgatttagacattagtgaagtcggactcggctgtatgtctcttggaactgaaaaaaacaaagcattgtccattctggatgaagcgatcgagctcggcatcaactatttggacacagcggatttgtatgaccggggacgcaacgaagaaatggtcggtgatgcgatccaaaacagacgccaggatattattctggcaacaaaagcgggaaaccgttgggatgacggaagcgagggctggtattgggacccttcaaaagcttacataaaagaggcggtaaaaaagagccttacacgtctgaaaacagattatatcgacctttatcagcttcacggcggcacgatagaggacaacattgatgaaacgatcgaagcgtttgaggaattaaaacaagaaggtgtcatccgctactacggcatttcttccatccgcccgaatgtgattaaagaatatgtaaaaaaatcaaacatcgtcagcattatgatgcaattcagcctgtttgacagacgccctgaggaatggctcccgcttttagaggaacatcaaatcagcgtagtcgccagaggtcctgttgccaaagggctcttaactgaaaaaccgcttgatcaagcttcagacagtatgaaacaaaacgggtacttgtcctattcattcgaggaactgacaaatgcccgcaaggcaatggaggaagtggctcccgatctttccatgacagaaaagtcgctgcagtatctgctagcacagccggctgtcgcttcagtgattacaggcgccagtaagattgagcagttacgggaaaatattcaggcagcaaatgcacggcgtttaaccgaggaggaaatcaaagcgctccaatctcatacgaaacaagacatttacaaagctcatcgctcatagcagaaaaaccagcacccgtacaggtgctggtttatttatattgatgccaatccatttggctttcatttaggagttcttcaaagctcttatttttttcgatctcttttttctttctgatctgttctgctttttctctttcctgcctcttttcatcctcttccttcaattggctcttcatctccataagctttgctttgatatcggattgaaggccgtcttttagctggtgtttgtcagcaagatttttgttttttcattcagacttcccccatgttttgttttgaagacagtttatcacggagcatatacactgaacaagccgactctcttctgatcactttctcagcggagcagtgtttaggtataatgatttcaaacacgaattgcctatatatttagttgaaaggtgctgtgacttttgaagaaaatccttttggccattggcgctctcgtaacagctgtcatcgcaatcggaattgttttttcaaatatgattctattcatcaagaaaaaaacggatgaagacattatcaaaagagagacagacaacggacatgatgtgtttgaatcatttgagcaaatggagaaaaccgcttttgtgataccctccgcttacgggtacgacataaaaggataccatgtcgcaccgcatgacacaccaaataccatcatcatctgccacggggtgacgatgaatgtactgaattctcttaagtatatgcatttatttcttggtctcggctggaatgtgctcatttatgaccatcgccggcatggccaaagcggcggaaagacgaccagctacgggttttacgaaaaggatgatctcaataaggttgtcagctggctcaaaaacaaaacaaatcatcgcggattgatcggaattcatggtgagtcgatgggggctgtgaccgccctgctttatgctggtgcacactgcagcgatggcgctgatttttatattgccgattgtccgttcacatgttttgatgaacagcttgcctaccggctgagagcggaatacaggctcccgtcttggcccctgcttcctatcgccgacttctttttgaagctgaggggaggctatcgcgcacgtgaagtatctccgcttgctgtcattgataaaattgaaaagccggtcctctttattcacagtaaggatgatgactacattcctgtttcttcaaccgagcggctttatgaaaagaaacgcgggccgaaagcgctgtacattgccgagaacggtgaacacgccatgtcatataccaaaaatcgggatacgtaccgaaaaacagtgcaggagtttttagacaacatgaatgattcaacagaataaaaaagcgaaaggcctattcggctcttccgcttttttatgttacagaacgtcggtaatgccatccatattttctctgatccattcaatcgcaagatctatcgttgtaaactcctgcgtctcaaaggtcatttcatcctgcaatagccagacatctttcttgatggactctgctcctccgattgaccagtgaagcaaggtatagggatggttttgattcaggaaggatacccacgttttattttgtgctgtgttcttcattgccttcagcttttgttccacgtttcgcgtctcctactttactaatatgctcattctggggctgagcatttcagccgggcttttcagcgccaatgttttggctttttcattgtaatcgatcgtcatttgatcgtcaaaaaacactttttgtgacgattggatatacagcggaatgccgttcgtttccagctgctcgcactgtcccgttaattcttctgccagccagattgtggggacaccgcttaccgcgcagccgcatccttctgcatcgtaacgaagctgggctttttttcccgggttggcgtcaaacgcctgctgcagtgcctgttttgctgcatctgtcacatgtatgttcataaggtgaaacccccgttttcatcattttcgctattgtagcatacaacactgccattcgcattgtttctgccttttttccaccgcttcgcattttcttctgcagtcttgatccactcatctttcccttttatgtactgattgatgctgtcaggatgctgggccgccagccgttttttgagaacggcgtattctttcgctatgtttggatgagctctgagataatctctgaataacagatgcctttcaatagcagggtttccctgttcgtacatatggacatgatgagtgcgtttatttccgcccttttggaaataacgcctgcccgctatgccgttctcaccttttggtgtatagccgttagccttcatttgttcatcaaattggctcacggcttcaatgcttctgacttcaattaacatatcaatgattggcttcgctgccatgttcggtatcgatgtgcttccgatgtgatgaacagcgataatctccggcccgaacacaagtttcagcagttctttttcttcatcgaaacattctgcccatttttcgttgtagagaatgacctcaacttttcttttcggatacaaatgaaagaccgacagcaatagaccctgcgctgctttgacggtttctgccttttggaatccggcctgtgtatagagtgacacggccggggtattgttctcggctgtgactacttcgattttctcagcgtcttcattatgatcaatgacaaattgcagaagtgctcgtccaattccttttctgaaaccgtcaggatgcacaacaagcctgcaaatggtgagatgatgcatgtttttctcatatgaaatgacaccgatcagcttgccgtttttccgatatcccgcaaaccgttcatgggatgcttgaatatccttcaccttctcttgtaaagcgggaataccgtcaaaaccgataatctctgtttcctttatgtaggcggggatctgtacggctaaaatctcacgcgctatcgtgtcttccttatgctggagaaattcaatcattcgtgttcctcctgaaacagccgctgtctttcgacttttgcgacgcggactgcatacgactcgtaccaaaggctttttcctttttcttttgccgcttgatgttcagtgtgatgcttccaatggttaattgcgtccatactgtcccaataggaaactgtgatgccccttccatccgcttcacgtacgctttccacgcctaaaaatccaggctgatccgccgcaagtgataccatccgctccgctgtttctccatatcctgtgtcattttcgcttttgacagaagaaaaaatgactgcatagtaaggaggctcaggtgtttttgataaaaaatccatcatatttccccctcatatgtttttgacaaacagtaccctgtcttgacccggaccatcatagtttgcaaacactgagatgccatttaccgtcttggtgcccttttcaatatcaaaccccaattttgtgtgatatgcgattgataccttattcacaggtgaggtgacgcactttacccgggtgcagcctctttgttttactgtttcgataaatacatcatacaattgtttacctatttgcatttttctgaaatctggatgcacaccggaaaaatgaatgtacgccgtttcaggatccgattgcgattgaaatccgattaaaaatcccgtcatgctgttatgttcggatgtaataaagcttgtgtcctgaaaatgctcaaaaaatagtctcggcaatttttctttcagctgtctgccgccccaccattcattcagtacagacgttaccatttcataatctgaagacgtgattgttcgaatatccattacgatttgatctccctccgtctggcaaaacgaatgtcagctctttttctcacaatataaaaattatattttgcctggctggaattgtaaatgccttctttcctgtatcatacgtttccagactgccgagggaacaatgtttgatcattttacgcctatttctcccccaaacaggaggagagactttacagcacaatatcaagcacttgatcaagtttcagcttataaagctgatcctcgtctccttttatccatactgctttttcaaactcttcataccggcagattttcccggtgcagcagacaatctcaccgtcctgaaagcagctgacagtgatatcctgagcaaactccatcgcggtgcaaagcgtttgattcatctcttccagcttatcggggtcaaggatcggcttttgcagcttctgtttaagtcgctttctctccagcaggctttgcttatgttccggcagaaacatcctgctcccttcccacagcaggttgcccctttttaaatgatcgttcatttataatgcccccctattttagccgcacgttcaaatgcctggcctgccgctgtcagtgacgccgccctgatgattgctgtgtcgccgaatcgatttttaatgccgtccatcacatagcctaggctcattttctttgcataatcctgaaataaattgagctgccatatgtcatcagatgagagctgagacagattgacaccgagacggcggacaggtttcccgtcccaaaatgtaagaaacagccggcgtacagcctcatatacatcctgcgtagaattagtcggctctgccagcttcacttgccggttgaagcccgtcggccaatcaaaatcagcaccccggcagctcactgacaccgtctgccccatgaccccggcgtttcggcttcgcctgcacacttcttcactcagctcaagcaatacgaccttgatttctttgtcaaagtgttcgtagtctctcgggagagtcattccatggcctatcgccttttgcccgtccagagacgaagttgacacaggggaatagtcgattccgtttgccgtcatccacagcacgtggccgttaatgccccatttcttttttaaaagatcgagcggaaaagccgcgagcccgccgatcgtgctgatgcccattcgatttaaatgatgcttcatgcggctcccgacgccaaacatgctgcccaccgggagcggccacatttcggttttcatattttctttcgttaaggtaaaaataccgttcgtattctttttggcaaaattgtcacacgcaattttggccagcgctttgttagggccgattccgacccgtgcataaacgccgatctcccgcatgattctgccctgaatgcttttcgcgatctccatcggcgtcccaaacagcttctggctgcctgtaatgtccatgaactgttcatcgatagaataaggctccacaaggtctgtatactcctcgagaatggccgtaatttgcagtgatacatcaatataccgctgcatacgcggccggagcacaacagcctcaggacacttttcctgcgcctcccacagccgtgaagcattcaccacacccttttgtttcgccagcgggcaggcagccaatacgactccgccccttttttcagggtcacccgaaacaatgacgggcttatttttcaaatatggattttccgctttctctacagatgcataaaacgattgcatgtcaacgagaaaaatcactttttctttcatcatacacacctctaaaaagaacttatgttcgtttttcattatatgcgaaagtatgttcgttttatactggtaaatgattcttgtctgacagaaaatatgatccaagggtttgagagaagaaaaacatttagtagaataaaagcgaacataaggataggagagtcatgatggagaaatttgtcgaaaaaatgatggaacaggcattgcgtcaatacggcagaaacgttgctatagatccgttaagcccgtatgaaaaacaaagcctgaaagcggctctacaagagagacggaatgaagaaccagatgaggatttgcatgcgcatatagaagatatcatttatgactatgtcacaaaccaaggtctgttctcttaaacgcatgactgtcagttctttcagccgctgatgcggcttccctttgaaaacaccgcctgaaacaaataaacagtctcaggcttacagaaaaaagcaggattttctcacgctccatagattcatatggcctggcgtaaaattccccctcagaactcgcgcaaaacggaataagctgtccatgatcacgcgtatacactttttcgaagagatgtgctctcttgttctgtcatgcggtccatcggttttcagcttacatcttgatctcatagccggtttcactgccgatatgatctacgtcctggcggcttaaactaacacaccctcactgaccaatcgctttgcttttcatcggacatcccgtcatttttcttcttcaatttcaagatgtaaactccgtcagccacacgcatcctcaacgcatagtatattgccatccatacaatcaggcatactacatgtcaaaaacgaaatattttgaatgatctattggagaaggaaattttttcatatatgatagaggaagatcttacatacaggagagaatataattcatgaagaaatggaaagatatccacccgatcagctggacaattataatcggaaccattttcggcagaatggcaacatcgatgagcattccttttttagcgatttatttgacagccgtccaaggcgcatcagcttcctatgcagggctggtcatcgccgcgagctcatcagtcggcatcctcgcaagcttttacggcggatatatctcagataaattcggcagaaaaaacatgatgcttgtatcgattttcggatggatgctggtatttgcaggctttgcggcggcatctcatctctgggtgttttttgtagttaacgcattaaacggtctttgcaaatcactgtttgagcccgcttcaaaggccttgctgtctgatatgacagaagaaaaaacgagactgctagtttttaatttacgctatgcagctattaatatcggcgttgtcttcggacctgtgcttggcctatatttcggctcatcgcaatcgactacgccctttttggtgcctgcagtcatttacggactatacggaattgtgcttgccctccaatttaaaaaacatccatccttatcagcaccagcccagtcccgaaatatgagcgtgcgggaagcgtttatggtcacgcaaaaggattatctttttaccattgctttggtcggcattacgctatgcaccttcggctactcacaattcagttccacattccctcagtatatggcgcagaaccccttgatcggcaatggaacgaagctgtatgggctgatgctgacattaaacgcaatcgttgtgttggcgacgcaatttcccattgtccattttgcaaaacggttttcgccgctttgttctctgatgctcggtaatgtgatggttagcatcagcatggccattttcaccgtatcgcacggtgttccatcaattgtgatgattgtcatcacatttacaatcggcgaagtgcttttattctctatgatggatttgtatgtagaccagattgcaaaaacagggttaaaaggcacttatttcggggcaatcggtttttcacagctcggaaacgtcatcggcccttgggtcggggggatatgtatagacctgtttggcgctggccgtccgatttatattttttctgtcctgagcggcattaccctgctcggcctgccatttttagcgttcgcctatcggcagatgaaaacggagactacaaaacaccgttcccgtctggaaaagccgctttaaataaaaaaacgggagagaatcaatctctcccgcaacaatgaggtgatgaacatgaatataggcgatatgatgtttcagctgtttgtatttattatatttgccgctgttatctttgcggctgttacaggcttcaagtatgcgaaaaaccgaaaagcgcagctggatcgcattgagaaaaagctgaacagcctgtccgaagatcacgattaacagcttggggcaacgagctctaccttaatccgatccggatcctcacaatagactgcataatgcccgtctcctccggcaaaaggatgcctgtctcggtacaacacacgatagccttttgccgtcaatttttcggtcatctgatcgacttgatgcttggattcagcataaaatgcgagatggttcagaccgactcggcatctatggtattccggctctagaaatggctctttcgcctgcacaatcactaggtaaaaacgatctttcttccagctgatgcctgagctccatttttgatactctttatagccaagttcttttaagaaccagccccaaaaccgcctagacgcctccaaatcagagacatacagttcgatatgatgcacaatttcataccctccttaccagcacttcctcgaccttatgcccgtctcccttacgcaaaatgagatctgacctgaatttagtcggcaaaatattttcatataaattcggccggttgacactctcccaaatcgaggctgccatctcgtcagcctcctgatcggacaagtctttaaatttatgaaaatatgaatcaggattttgaaaagcagtttcccgaagcaggcgaaaacgctctaaataccaagtgaaaatccggctttcctccgcatccacataaatcgaaaaatcaaagaaatcggaaacaaaaatacgcgggttttcccggtcatcctccaaggtgggcgactgaagcacattaatgccttcaataatcacaatatccgcctgttctacaacctcgaacacaccttcctcgcggtcataggttagatgggaatacaccggggcctttacgctgtcctttcctgattttaagtcattcaaaaattcgagcagcgcctttacatcatagctttcaggaaacccttttctagacatcatatttttctttttcagctcggcagtaggaaataaaaaaccatctgtcgtgataaggctcacttttggacggtcaggcaaacgcgaaagcagcttctgcaagatccgcgccgtcgtgctttttccgactgcgacactgccggcaatgccgataataaacggaattttggctgaatgtggatgcttcaaaaaaacattgacatgcttattgcgttcagccgcagacttgacatgtaaatgaagcaagcgaacaagcggaatatagatcgtttccacttcttcaacagatagataatcattcaatccttccacagcttttgcctcttcttcagatacagcaatcgacaaatgccccccaaaaccagaccaagactcccgattgtgctgtgtatataaagtatgtaggttaagttctttatttttcactgtttacacctgactctctgtaggttaaaacccttacaaagattgtaacggaaaaccttttcactgtctgcttatttttcatttcgtttttttagcaaatcagcaccaattcggttatacgcagccatttcatcttttggaaccatgcttcctcccgttccccagacgacatgtacagcatgttccatcttatatttttgaccatagcgccttccctcttctgtcgaaaaaagctgaaccggcccgaacatgcccgcaagagcagagggctctaaatatttatcttcagatacagccagcatatgaagcaaagtataaagcgtattgtcctctaccgtataacagccgctcagaagcggttcaatcagcttgccgacaaatcctgacggcctccctacggcaagtccgtcagcagcagtctgattatccaggccgatatcctggacggagatcttttcgtgaagtcctgaataaagccctaacagcatacaaggtgaatgagttggttctgcgaaaaacacatgaacatcatctccgtataaaagcttcagcccaaatgctacaccgcccggtcctccgccgactccgcacggcagatacacaaacaagggcgtctcaagacttggctttatattcatacagtcaagctgcgtttttaatcggcttgcagcaacagcatatcctaagaacagctgtcgagaatgttcatcatcaataaaataacagaatggatcatgttccgcctgccgtctcccttcgttcaccgcttcgctgtaatctgtttcgtactccataacagtgactcccttttgacggaggagatcctttttccactgcttagcatcggcggacatatgcactgtcacgcgaaagccgagtgccgcgccgatgatgccgatgcttaaacctagatttcctgtcgaaccgacagcaatcgaatagcgggagaaaaacccggtaaaccgctcttcctgtaagatgcggtaatcatcggtttcctgaagcattccttcttgaagcgcgagattttcagcatgctttaacacttcataaatcccgcccctcgctttaatcgatcctgaaatcggaagctcatggtcgcactttaaaagccatcttccgggaaatggctgctgatatgccgcttccagctttcccttcatatgctgcacctcaaaaagcggagactcgatgattcctttagcgcctttcgtctcaggaaacacctcggcaatgtaaggtgcaaaccgctgcattcttttttccgcttccgctatctcggttgcccactcatctgcacggggtaatggcccctctttcttgcctgaatttgcccagaatacaggctctgcatcaatcagtttctgaataaacggatctttaagcagagcatgaaggacttctgaatgaactgacattcaacaatctctcccttccactatcaaaaactgccccgtgagaaacaagccactccaccacaggcagttctatcattattttttcatgagcgcgcgtcctgccagcttttctacaagagctggaaacagctgatacagcttagtgccggcattcattaaacgcggaagattgatctcccgctttttcgtaaaaattgcagctgtaatttgagctgccacgtcatcaggatcaagcatccagcggccgacatttttggcgtagtccccgcctttatcagcaatggaaaaaaagtccgtctgaatcgggcccgggttgactgttgtcacataaatgccggttcccgaaagctccatccgcaaagcgtttgagtaacctaacacggcatgtttggtcgcggaatacaggctagacttcggtgttgcgattttccccgcttgagaggcgatattgatgatatgtccctttttttgctcaagcatctgcggaagcaccgcttttgtacaggcgatcaggccgaagacattcacatcaaacatcgctttcatgtcatccaatgtagagtctaaaaccgtttcaaatataccgaagcctgcattgttaatcagtacatcaaccgagccgatctgatcgcggacccgggcgatatcctctaggcggccgacatccagaggaaaaatctcacactgtccgctccattcctcggttattttccttttgatttctatcaaacgatcctcgcgtctagccgacagaaggacatgggctccttcagccgcgcataagtatgcgattctttcaccaagccctcctgaagcgccggttatccaaatcctttttcccgctatatgtttcacccatttcacctcttcattgttttaaagtatgcggtatttccttcccaatatgacgtgatggcttcttcagcctccaacacatcaaggtgacctgccgtttctgacatcgttaaaaacaattccttttcatatacagcaggaaaaagctgctgacagacctgaaaagcggtcatcggcttttcatccagcatgcgacgcacatcctccgtcctgttcctctgcttgtcaaaacgcttctcaatcagcgcttgtacactggtgataggctcgccgtgaccaggaaatacgattgttggatcaagttgagacagccttcgcaatgaccgctgataatccactaaaggctttgacctgacgtcccccgctttcggcgcttccaaaatcggattagacgagctgtttgccagcagtagatcgccgccaagcatccttccgcttttttcatggaacagaacgatatgcgattcagcatgtccaggcatctccaacacggaccagccctcaagcccatctatgcccataccttctctgattgtttttgtcagagatctcgtacaggaaaatgcgtacgctgatcgaatcagcttttccgccttccccgtatcaaatggaacgcctaattcaggcagcagcttttgaaaaaaacgtttttgccaatccataaaggcttgatctcggctgatataaggttcgttgaatgtatgcccaatcacttcgatttcatctgaaaagacatcaagcaagcctgcatgatcagcatgatggtgagtcagtacaacctgctcgatatctgacattttcacatttacagcggcaagctgctcttgtagggctctggcagcctcttttgtattcggcccggcatcgataagtgtcagtgcatcaccttttacgaggtaaacgataacatcgccgacagcaaacggcgtcgggacgcggatcgcaattacatcttcagttgtcatcctttcgctccttgtcttcattcattattcatattttagctttttctcggtcttgtgtcattattgcagaatgagaacaaacctttttgaaaaagctattgacattagcttatccgccattgcataatgaacaacaaactaaaacgagaaccattggaacgctatgacgaggaatagtatacaaggcaatggcctaagagagcgatacccccggctgaaaggtgttgcggcccgcttgtttgtagaacctgccctcaagtcgcggttaggaaaacctaaacgtttcccgcgttacgggatttgagctgagcacaatttgtgctaatgagggtggtaccgcgaaccttttcgtcctttacgtgatgaaaaggttttttgttgttctgatagaaggaggatatcaatgaaaaagataggatttgtcggcgccgggtcaatggcagaagcaatgatcaacggcattttgcaaagcggcatcacaaaaccagaacatatctatattacaaatcgctcaaatgacgagcgtctgattgaattaaaggaaacgtacggcgtgcgtccatgcagagataaaaatgagtttttcactcacaccgatatcattatcctcgctttcaaaccgaaagacgcggcggaaagcatcgacagcatccggccgtatatcaaggaccagcttgtcatttcagtacttgcaggccttaccatcgaaaccattcagcattattttggcagaaagctcgcggtcattcgcgtcatgcctaatacatcagcggcaatcagaaaatcagcaaccggattttccgtaagcgctgaagcaagccagaatgatattagtgccgcaaaagctctattgaaaacaatcggtgatgcaacactggttgaggagcgagatcttgacgctgtcactgcaatcgcaggcagcggcccggcctatgtgtatcgttatattgaggcgatggaaaaagcggcacaaaaagtaggattagataaagaaacggcaaaagcactcattttgcagacaatggcaggggcaacagatatgctccttcaaagcggcaaacagccggaaaagctgcgtaaagaaatcaccagtcctgggggcactacagaggcaggtcttcgcgctttacaggactcccgctttgaagaagcaattattcactgtattgaagaaacagctaaacggagcgcagaaatcaaagaacagtttgccgttgccgccttagagagacattcttagatgtaagacaaaaacagaaggcactgtgccttctgttttttatttttcccgcagcagctggccggcagattctgattgctttaatagcgcggagatcgtaaatgaaagcaaatcgggaagcacttcaaaggaataaggcatatacaatctttccgtccatttatgcgggtctttaccagccggaccgacatttaaaaccggaacatataaagcctgatttttaccgcttggcaatgaatatcctctgttaaagagcggcatattgcttgtgtatgcatcaacctcctgtttttccagctgaagataactcaagtccgaaagtccggggaagtactgaacctcccgtaatgcaatgccgtatcgctcagccgcataatgctttatctgatctgctgtatttctgatcaattgatcatcctttgaagaaacagctggataaagcggcggactataaaacagaacgatgagcggcgcatcctccttacaaagcgaagcaagctcagaaacaattttcgtcgaaaaatccctgtctccaagctcccccctgttagcaaaggcataatttagagcccgctctgtttccgagatccccgcacgcttttttgcacgcgagaccagctcatcaaatgtcaaaacagtgacgtcccgctcaatcggctgaaatggctcaaattgttgaaaatcctgtgttttcttccgaacgttcgacatgatttcctccgccgcctgttctgctgttttaagcagcatctgatgcagctcactagctgagcgtttcattgacagcacattaaataatgtgacggctgtatgcggtgtctggactgaatatgcctctttcaagtccttttgcattaagtttaccggcggcggagtgacctcgccatcaaccttttcgcaataatcagcattcagttcaagcaaacggttaatctcagataccattaaatttgcgtttaggcctgaaaacggctctccaacatgtgtctcaatccccttgcagaaaaaacccgcaagcaccttgccaatgcttcctgtataaaaatattgctgctggtcgccgggaaatttttcaaacatcggttcggcattcaggcaagcggttaatgtgatatcatgctttttctccatctccttcaatgcaggaaccgcttcaatcatgcctcttgaattcacttcctcgtccggaaccgttatcaacagcagattgccctcaaaatgcccgttcattgccctctccagcatcgacagttgaatacaaagccccgctttcatatccatcgtccctcttccgaacagccagtctccgctttcggcatctcttctcacacgttccgggagcagctcttttttctctaaaaaggagctcaaaagctcagcaggcttgcaagccatatgtttaaattcgccgtaatcttctatgtcaacgacatcaaaatgactcagcagaagcactgtctttttgacattcttctttttgactagagccgtaagaaaagatctgccatcgtccatcggatgaagtgttacatcatcagggtgcttttgaaaatagggcttgtccttcaaaataaaataaagatactctgcaagcgctgcctcgccctttgaaccggtgatgctttcgtattgcacaagagaagttaaaagtgccagcaattcgtccttcgtctgccaattcattgattccgcccctcctatgaataaaaatgcttctatactgaaaaataaactgatttctcgtctattatacagaaatgtttgacaaaagcggttcatttgagcagtttatatgacgggaaagaaatgacttgatataatcaatctctaaaaaccttacgggaggcgaaagaaatggccagaaaattatttacacctattacaattaaagatatgacgttaaaaaaccgcattgtcatgtcgccaatgtgcatgtattcttctcatgaaaaggacggaaaattaacaccgttccacatggcacattacatatcgcgcgcaatcggccaggtcggactgattattgtagaggcgtcagcggttaaccctcaaggacgaatcactgaccaagacttaggcatttggagcgacgagcatattgaaggctttgcaaaactgactgagcaggtcaaagaacaaggttcaaaaatcggcattcagcttgcccatgccggacgtaaagctgagcttgaaggagatatcttcgctccatcggcgattgcgtttgacgaacaatcagcaacacctgtagaaatgtcagcagaaaaagtaaaagaaacagttcaggagttcaagcaagcggctgcccgcgcaaaagaagccggctttgatgtgattgaaattcatgcggcgcacggatatttaattcatgaatttttgtctccgctttccaaccatcgcacagatgaatacggcggctcacctgaaaaccgctatcgtttcttgagagagatcattgatgaagtcaaacaagtatgggacggtcctttatttgtccgtgtatctgcttctgactacactgacaaaggcttagacattgccgatcacatcggttttgcaaaatggatgaaggagcagggagttgacttaattgactgcagctcaggcgcccttgttcacgcagacattaacgtattccctggctatcaggtcagcttcgctgagaaaatccgtgaacaggcggacatggctactggtgccgtcggcatgattacagacggttcaatggctgaagaaattctgcaaaacggacgtgccgacctcatctttatcggcagagagcttttgcgggatccattctttgcaagaactgctgcgaaacagctcaatacagagattccggcccctgttcaatacgaaagaggctggtaatgccataagagatatcctgtagaggatatctctttttttatttttagagaaacgatcggctaaggttctccgtctccctagtagaaccaattagaggagatgactccaatgaaatcagcttggatggaaaagacatatacaattgacggatgtgcgtttcatacacagcaccggaaaggatcaagcggtgtaacgattgtctttgaggccggctatggtacttcttctgagacgtggaaaccattaatggcggacattgatgatgaatttggcattttcacatatgatcgggcaggcataggaaaaagcgggcaaagcagagctaaacgaacagctgatcaacaagtgaaagaattggagagtttgcttaaagcagctgatgtaaaacctccttatttggctgtttcacactcatacggagctgtcatcaccggtttatgggcctgcaaaaacaagtatgatattatcggcatggtccttcttgacccagctttaggcgattgcgctagctttacctttatacccgaagaaatgcacagatcacatacgagaaagatgatgcttgagggcacacatgcagagttttcaaaaagtctgcaggagctcaaaaagcggcaagtccacttaggaaacatgcctcttcttgtgttgtcatcaggagaacggactgagaaattcgctgctgaacaggagtggcaaaacttgcacagcagcatattgtctctatctaaccaaagcggctggattcaagctaaaaacagctcccacaacatccatcatgatgaacctcatatcgttcacttggctatttatgacgtatggtgcgcagcgtgccagcaggccgctcctctttaccaggcagtcaattaacgtaaaaaaagaccgggccgtaagggattcccggtcttttatattattttgtttcacggtgaagggtatatttctttaaacgcggtgaatattttttcagctccaaacggtctggattggtgcgtttattttttgttgtgatgtaatttcggtctcccgtttcagtgcaggctaaagtaacatttactctcataattaacatctccttataaagcgtaatgattacgttttattatacaacgtcatcacaaattgtcaaataagagctccgccttcagcctcgcgggacgtttacctctaagaaatcatatgccgccacgctattggggaaaacgtcaaccgcttctttttgaagctccaaagaagcatctccctgatatcttgcgctgatatgggttaaaatgagctgcttcgctcttgcttctttcgctgttacagccgcttgttccgttgtactgtgataataatcataagcaagtttacggtcttccttagcaaaggttgcttcatgaacaagcacatcacaatccctcgcaagctcttttagtttgtcacttactctcgtatcaccggagaacacaacagatcttccctttttaggaggctccagaaaatcattcccattgatgattcgtccgtcttcaagcgttaccgtttcgccttttttgattttctgatatacaggtccgggcgggatgttcatttcttttaatacgtcagccttcaaggaacccggtacgtctttttcctgcacacggtacccgaaggcttccactccatgaataacagataccgctgtgacaataaactgatcgtcctcaaacacgattccttcttcaatttcctggatcgcaagcggatatgtcaaatgggttttcgtgacggcaaggcttgtttcaataaacgccttgatccctttaggtccgtacactgtcagctcgtcctctccgccttgaaaggaacggctccccagaagccctggaagtccgtatacatgatcgccgtgcatgtgtgtaataaagattttctctattttacgaggtttaatcgttgtatgtaaaatttgatgctgtgtggcttccccgcagtcaaaaagccataccgaacgcctttcttcaagcaattttaatgccaccgacgttacatttctcgccttggcggggatgccggctcccgtccctaaaaaaagtaattccacgtttccttcctcctactagaaccagatacctacaagaatacaggatcaagctcaaaatgtgaatcttgcctctgaaaagaacaatcctttcgtgctagaaacattttttcagcattctgcttaaaaaagggcttaaatgtttgctttcgttgaattttagatttaaaatgaaggaaatatacggggtgtactaaaataaagcttcgaataaagtgaggtacttttagtgaaaacaaaccaacaaccaaaagcagtaattgtcatattcggtgcaactggagatttagcaaaacgaaaattgtatccgtctattcaccgtttatatcaaaacggacaaatcggagaagagtttgcagtggtaggagttggaagaagaccttggtctaatgaggatcttcgccaaactgttaaaacatccatttcctcatctgcagataagcatatagatgatttcacgtctcatttttactatcacccgtttgacgtgacaaaccctggttcttatcaagagctaaacgtattgcttaaccagctggaagatacatatcaaattcctaacaacagaatgttctacttggcaatggctcctgaattcttcggaacgattgcaaaaacattaaaatcagagggtgtaacagctacaaccggctggtcccgccttgtcatcgaaaaaccgttcggccatgatctgccaagcgcacaggcattgaataaagaaatccgcgaagcatttacggaagatcaaatttacagaatcgaccattatctaggcaaacaaatggttcagaacattgaagtgattcgatttgccaatgcgattttcgaaccgctttggacaaaccgctacatttcaaacattcaaatcacatctagcgaatcactaggcgttgaagaccgcgcaagatattacgaaaaatcaggcgcccttcgcgacatggtgcaaaaccatattatgcagatggttgcccttcttgcaatggagccgcctatcaaattgaacacagaagaaatccgcagcgaaaaagtgaaggtgctgagagcactgcgtcctattgcaaaagacgaagtggatgaatactttgtgcgcggacaatatcaagctggtgaaattgacggtgtaccggttcctgcttatacagatgaagataatgtcgctcctgactccaatacagaaacctttgttgccggcaagctcctgatcgacaacttcagatgggctggtgttccattctacatcagaaccggaaaacgaatgaaagaaaagtccacaaaaattgtcgttcaatttaaggacattccgatgaacctgtactacggtaatgaaaacaacatgaatccgaacttgcttgtcattcatattcagcctgacgaaggcattacgctttacttaaatgctaaaaagcttggcggagcagcacacgcacagccaatcaaactcgattattgcagcaattgcaatgacgagttgaacacccctgaagcatatgaaaaactcattcacgactgtcttcttggcgatgcaacaaactttgcacactgggatgaagttgccctttcttggagctttgtcgactctatttctgaaacatgggcagcaaacaaaaccttatctcctaactacgaatcaggctcaatgggaccgaaagtatctgatgatcttttggcgaaagacggcttacactggtggaatatataataagaagaaaaaagccgaaaatgtttacaagcattttcggcttttttgcagctgtcacagaggtatagcactctcattaataacaaaacccccgaagctctatagctttgggggtttctattgattacttcatccattcagtatggaagatgccttctttgtcagtacgctcatacgtatgagcgccaaagtagtcgcgctgtgcttggattaagtttgcaggcagtacggctgtgcggtagctgtcatagtaggctaatgcgcttgagaatgatggcaccggcacaccttgggcaactgcaagtgaaatcacttggcgaagcgctccttgatagctttctacaatattcttgaaatagctgtcaagaagcaggttgtcaagctcaggctcgcgatcgtaagcttctttgatcttctgaaggaatgccgcgcgaatgatgcaaccaccgcggaagatcatagcgatttcaccatatttcagatcccagttgtattcttcagaagcagctttcatttgggcaaatccttgcgcgtatgaacagattttactcatgaacaacgcttttctgaccgcttcaatcagctcttctttattttctgtaacaggcttcacttctggtcctgaaagaagtccgctcgctttcacacgctcttccttcatagctgagataaagcgtgcgaatacagattcagtaataatcggaagcggaacgcctaagtcaagtgcgctttggcttgtccattttcctgttcctttttgccctgctttatcaagaatcacatcaacaagcggcttgcctgtctcttcgtctttttttgtgaagatgtcagccgtaatctcaatcaggtagctatcaagctcacctttattccattcagcgaaaacttcatgaagctcatcagcagaaaggcccagcacctgtttcagaatgaaatatgattcagagatcagctgcatatctccgtattcaattccgttgtgcaccatttttacgtaatggccggcgccgtccggaccgatatatgtcgtacaaggttctccgtcaacttttgcagaaatggcttcaagaatcggttttacaagctcatgtgcttctttttgtccgccaggcatgatagaaggtcctttaagtgccccttcttctccgccggaaacgcctgttccgataaaatgaatgccgctttcagcgagttctttgttacggcgctgtgtatctttatagtatgtattaccgccgtcaattaaaatatcatccttctctagatgaggaagaagagattgaattgtcgcatctgttgcagttcccgctttaaccattaataagattttgcgcggtgtttccaaggattggacaaattcttcaatgctgtatgtgccaacaacattttttccttttgcctcctgtaaaaactcctcagttttactgcttgatctgttgtaaacagaaacagaaaatccccggctttcgatatttaaagccagatttttacccatgaccgcaagtccgataacgccgatttgttgttttgacatattctaacgtcccttctgcaaacgtttaatcattttaaaatttaaattaaaataaaatgatatttataataaagaaattaccatacattcaccctttttttcaagcgattcagcttttcttttcatcatgaaaaaaatctttattaaagcttgttccctttgttttgctctcctctttttttaacgttgccccttttctgatcagtttggtaccgtactttttattcagcttttccatcatctgctgaataggctcatccttcgcatcttcattaaagctgaacaaatcgagctgtttataggcctgctctttttctactaaatccgttccggtaatgccaagcagcctgacaggatttttattccagtgtttaaaaaagaggtgctccgcttctttcaaaatgtcatttttttgatcaatcgggtttctcagcgtggtgcttcttgtgatggttttccaatccgcatatctaatcataataaaaagcttcgaagccatgacttccttgcgctgtaaacgggcactcacagaagcagcaagctttctaaagacgcctaacagctcttcttcatcactggaatcatgggaaagtgtcgatgagttgccgacgcttttaaattcgtaaatgcgctccgggtcaaccggcgcatggtgaatgccatttgctttatttttaaggcgcggaccgtttatgccaagcaggcgtttcagggagtgttcatcagctgcagctagctctccgattgtatggatgccgagtcccttcagtttttccgctgtctttttgccgactccgtgcatctctccaacaggaagcggccacaggatatcaggcacttgcctctttcttaaaatcgtaattccaagcggttttttcatatcagacgccatcttagcgagaaatttattcggtgcgatccctatgcttgacgggagcagcagctctttttgcagcctgctttggatttcttttgccgtctctagcgcgcggctgctgtatggtgtatcggtcatgtccatatagccttcgtcgatggagacaggctccaccaggtcagtatattcacgaagaatggtaaacatcgctcgtgaagagtttctatagcggtcaaagttcggcggaagaacgatgagctcagggcaatggcgcttcgcttgccaaaccggcatcgttgttttgacgccgcgcgctcttgcttcgtagctgcatgttaccacaatgccctttcgctcctttacgtttccggcaactgcgaccggctttccccggagagccggatcatatgccatttcaaccgacgcataaaagctattcatatcaatatggaaaataattcggctctttcccggcataaacaaatctccttttcggtcattagacaacagcttgtacatatagtaaaatgaagctattgaatggatgtgatgacaatgtttgtggaatcgataaatgacgttttattcttagtcgattttttcacaattattcttcctgctctgacggcaatcgggattgcattcctcttacgagagtgccgtgcgggcgagcaatggaaatcaaaacgaacagatgaacatcagacggtctttcacattaaccgaacagactttcttattattatatatcatcgcattacaacttggatacgtaaagtcttccgcatgaattcgcctgtgaacgatgaggaagacgccggttctcttcttttataaaccgcatttataaaaaggaggagaacaaaattgttaaaaacatatcaaaaacttttggctatgggtatctttttaatcgtattatgctcgggcaatgctgcatttgcagcgactaatcaggtgggaggcctcagcaacgtaggttttttccacgattatttaatcgaaccgttttccgctctgcttaagggtgttgccgggctgtttcacggagaatacggactctctattatcctcgtaaccattattgtgcgtatggttgtactgcctttgtttgttaatcagttcaaaaaacaacgcgtgttccaagagaaaatggccgttattaaacctcaggttgacagcattcaggccaaattgaaaaaaacgaaggaccctgaaaaacaaaaagagctgcaaatggaaatgatgaagctgtatcaagagaacaacatcaatccgcttgctatgggatgcctcccaatgctgattcagtttcctattgtgattgggttttattacgcgattcgctctacacctgaaattgcgtcacactcgtttttatggttcagtttaggacaatctgacattctcgtgtctcttagcgcgggagcaatgtactttatccaggcctatgtcgctcaaaaactgagcgcgaaatattccgctgtcccgcaaaaccctgcggcacagcaatccgcaaaattgatggtgttcatcttccctgtgatgatgacgattttctcgcttaatgttccggcagcccttccgctgtactggtttacaagcggactgtttttgacagtgcaaaacatcgtccttcagatgacgcatcataaaagtaaaaaaacagccgctcttactgagtcggtgaaataaaaaagcaaccccgcgcgaaaagccggggttgttttttgttacttgcaaagcataccgcgccaaacagtcttgtttatcatagctgaagcagaaatggccatccaaaaaatagccgtatcgtttaaaaagaaggaaatagggaatacctttactcacctccaaacgaaaggagcatatacgttgacggaacactttcagcaaaaaaacatttctgtacctgatggaatctggatcatgagacaaacctggaatgatgtcttatttgctcactggcctgttgatgtttctatccttcgcgctttggtaccgtccgttttagaattagatacatataacgggcaagcttggatcagcatgcttccctttatgctcacgaacctaagggcgcgttatcttcctgccattcccggtgcgcgtgcatttcctgagcttaacctccgcacctatgtcacgtataaaggcaagcccggcatttatttttttagcttagatgccgatcatcgtctggcggtccttggcgctcgcacattctttcatctgccttatttttacgcggatatgaagtccgaaaaaaacggtgatgccattgactatgtcagcaagcggaaaaatgacaaagaagcagcattccacgccgcataccggcccatttcagcgccttttacagcagaaaaggattcgctcgattactggctgacagaacggtatagactctatactaccaatcaaaacaaactctattacgaagacatccatcatcatccatggctgctgcaaaacgccgaagcggaaatttcagtcaatacggtgactgatgctcacggcattacattgccagagtcagaccccttgcttcattacgctaaaaaacaggatgtgttattttggccgcttaggaaatggagctaaaaaaacccgatgcgggaaatcgcactcgggttttctttttttattttgccgcctcttcaataatggcaacaaccatttctgccgttttaacgagctcttcgatcggcattttttcattttttgtatggatttgctcataaccgacagcaagattgaccgtcgggatgccatgaccagcgattacgttcgcgtcgcttccgccgccgctcgtttgcagctcgcttggacgtccgattttagcagccgcttttttcgcgatttcaacaacttggtcgccgtcttgatatttaaagcccggatacataacctcaatttcgacttctgcgcgtccgcccatatcagcagctgcctcttcaaaagcagctttcattttttgaacctgagcttccattttctcaggaactaaagagcgcgcttcagcaagaatatgaacttcgtcgcacacaatgtttgtttgtgtgccgccttcaaaccggccgatattagctgttgtttcttcatcgatacggcccaatggcatttttgaaatggctttgctagcgattgtaatcgctgaaatgcctttttcaggttcaaccccggcgtgagcggttttcccgaaaattgccgctcttaccttcgcctgtgtcggcgcggccacaatgatatttccgacttttccgtctgaatcaagagcatagccgtaggatgcagtgatcatagaacggtcaagcgccttcgctccgatcagacccgattcttcccctactgtgatgatgaattcaatcgtgccgcgttcaatgttttcttctttcagcaccttaatcgcctcaaacattgcagccaatcccgctttatcatcagcgcctaaaatcgtcgtgccgtcagttttgacgtaaccgttctctacaactggttttacgccgtttccgggtacaactgtgtccatatgagatgtaaaatagatcgtatctgtttgttttgtcccttttagcgtgcaaatcaggttaccggctccgtggcccgtgatatccattgtatcgtcttctttaacgtccacacctaaatcagaaaattttcgtttcagcactttgcagatttcagcttcgtgctttgtttctgagtcaatttggacaagctctaaaaattcttccagcaggcgtttttcattcaccatttgtaagtccctccatattaaagcggtatgttaccgtgcttttttttcggtctctcttctgtcttatgtgcaagcatatgaaaagcttgaatcagttttccccttgattcttccggcaaaatgatgtcatcgaccattccacaagctgccgctttgtatgggccggcgttttgctttttgtattcagctgttttttcgcgtttcgtcttttgcgggtcagctgaagctttgatttccttttcatacaaaatcgatgccgcaccttctggacccatcactgcgatttcagcattcggccatgcaaacacaaggtccgctccgatcgctttgctgttcatggccacataggcgcctccgtacgcttttctaatgatgagtgtgacttttgggacagtcgcttcagcataagcaaacaataattttgctccatgcctgatgattccattgtgctcttgctgaatacccggcagaaaccccgggacatcttcgacagtcaatagcgggatatcaaatgcgtcacaaaaacggatgaaccttgctgctttatcagcagcgtcaatcgtcaggcttcccgccagatgcttcggctggctcgccacgatgccgattgctttttcacccagccttgcaaacccaatgacaatgttcttcgcaaaaaatggctgaatctcaaaaaaagattgcgggtcagccagctccctaatcaccttccgaacatcataagcctttgtcgtatcagcagggacaagacggtttaataacggtctggacgcctctttctctggcttcggctctgttgtccggccattcagcggcaaataagacagcagttttctcacccctgtcagaacctccttctccgtatgcccggaaaagtgggcgtttccgctgacggcattatgtatccccgctccgcctaagctctccgcatcaacctgttcccctgtcactttttcaatcaccttcgggccggtaataaacatccggccggtctgttcagccataaatataaaatctgtgagtgccggagaatatacagcgcctccagcgcacggccctaaaataaccgatatttgcggaatgactccggaatataagacgtttcggtaaaatatgtgaccgtatccatctaatgataacacaccctcttgaattctcgcaccacctgagtcattcagcccgataatcggcgccttattttttgctgccagatccatcaaagcgcagattttcctggcatgggtttcgccaagcgcccctccgtacactgtgaagtcttgcgcaaatacataaactgagcggccgtcaattgtgccataccctgtcacgaccccatcccctaacatgcgctgttctcttgttaacacttgactttccatgaaggggtgtaattcgataaagctgtcctgatctagaagaaatatgatcctttcccgagcagtgtgcttgcccttttgccgctgctgagccagcttttcccgtcctccgccttcttctgcctgcttgcgtttcgtgtataaatgatccatgtgttcattcatgctcattgtgttggtctcctttcggttcacaaagctctacaagaacaccgtttgtttcccgaggggaaataaacgcgatctttttcccgttcgctccctgtcttggaaacctgtcaatcaattgaacatgctggtcagacaatgcttgaagctgttcagataggccgttgcacaaaaacgcaatatgatgcagtccctgccctttcttctccaaaaataaatggacggggctgtcagctgtcaacggctctatcagctcaagtttgacgctaccagcttgaaaaaaagcaacattcaccttttgctcttcaaccgtttcttgatgaagaaatgcaagccccaatacattttcataaaagcttcttgcatcttttatcgaaaaaacggctatcccgatatggtcaagcctgttcattttcatccctgctttcgctaatagatatcgcttgtccgcccattcaaaacacgctaaaatatagacagattgtttaaggagtgaaaatcatgtctcaaaaactgatgaaaagcgttttgatcgtgattttgggagtttttattctttcaactgtactctcaggaatcgtcatgtttctataacgataaaaaagcaggcgccttattcaatgggaatatcctgcttttttatcagagctttatgctcgatggcaatctcctcaaaagagcggttgtcgtccgtgatcagcactctcgttcctactggtatcgtttgaaacaaatgaacaacctcatcgttatgcatacgtatacagccgttagacacaaattttcctactgattcctctcggtttgtcccatgaattccataaatccgcccgtccgttcctttcgcgtcaaatccgatccatctggccccaagcgggttatcaggagatcccccttcaatatttttctttctgtagtaaggattttccgcttttaccgttaccgaaaactctccttcaggcgtcaaatcatctgtttttccagtcgccacactatacacgccttctactttgttgtcgagaataacagcaagttcatttgttcgcttgttgacaataacatacggatcacctggcagcggattttcgccgagcggccaaatcggtgaaatcatcattaaaatcgaacataagaaaaaacgcataagctcctcctttttcattaggttgaccaatgaaggaagagctcatgcgaatcatccgagtgatttttgcgcttttattcctttaaaataacttttaatcactaaatattgttccatttcgccgagaagatggaagagagcggccctcgcttcaaattcctctctagtcgcaggaagcggcatctcctcaaattcttttctcatgtcagcaagtcttttcagaaatttgtacgctgtattcccagggtgtatcgcctcccgcaaatcatgaataaattcagcgatcatttttccctgatctaccgtgatggagatcgatgtcactttagggagaaggcgttcgataatttcaaattgcttttctctcattttaaaataatgataatgcagattttcgtaacgcaaaatgtggttttgcacatctcgatatgccaggtttttagcctccgtaatgagctggtgcgtttccggaatttcttttcctgaccaatcttgctcaccagttaacaaataccgttcgatttctgcaaaaatgacagcaaagttatcctctatctttttgcggtaggcaatcagtttccggtcaagactaggcatatacaagttcatcaatagagcgacgccgatgccaaccgtaatcagctgaacttcattccagatgaaagcaagcgtaatgccgccggacatgtataaatgaaggataataacggaactggtgacgataccctcgttaatttttaacagaaccgttatcggaatgaatatcaaaagaagcgctccgatcacaaacgggtggtagccaataagctcaaaaaagagataagaaaaaacaattgccagacagcatgccgcaaagcgggcccatgaggcctgaagcgaccgtttttgtgtgatttgtatgcacaaaatggtgatgattcctgctgatgcgaagttttgcaaatgcaataactggcttatataaatagccaaagctgttccaagcgcggtctttattgtgcggtaaccaattttaaacatgtcggactccatttctatttgtttcttcaataaaaaagaagaggcggccagccttcttcttttttatattctataatattttctctaaaaagtcctgcgctcttttggattttggcgacataaaaaattccttcggattgccgtcttcgacaatcattccttggtccataaacagcacacggtctgccacttcttttgcgaagcccatttcatgtgtgacaatcaccatggtcatgccggtttcgaccagctctttcatcacctgtagcacttctttgaccatctctggatcaagggcggaggtcggctcgtcaaacagcatgatgtccggattcatcgcaagagccctggcaatcgcgacacgctgtttttgtccgccagacaaacggtttggatagtcatttcgcttttcaaacaaaccgactttgcggagcaggtcctcagctttctcctgtgcagcctgttttgattctttttttacattgacaggcgcgtacatgatgttttcgagaaccgttttgtgcggaaagagatgaaaatgctgaaaaaccatcccgatgttttcccggacctttaatgtgttggttttcggcttcgtaatctctgtgtcttttattgtaatggttccgccgttaggcttttccaacaggtttaaacagcgtaagaacgttgatttgcctgagcctgaaggaccgatcacggcaacaacctcaccctcagcgattgttgttgaaatgttttttaatacttcgtgtttcccaaatgattttgacagcttttcaaccttaatcattggatttcagcttcctttctacagccttgccgataaacgttaaaatcaggacaagcacataataaatcaatcccgcgataatgagcggctcaaggtaattgtaagtggcggcgccagcttgatatgcgcgtctcatgacatcaccaagcccgatgacggtgacgatcgccgattcttttgttaacgtaattaattcattcacaattgcaggtgatatatttttgaaggcctgcggcagcagcagatccttcatcatttttccatacgggacaccgagtgcaacagcagcttctttttgccctttatcaatggcattgattccggctctgataatttccgatacataagcggcggaattcaaagacaatgcgacaaccgcagcccaaaactggtcaatttgaaatccgagcagctgaggaaggccaaaatagacaatcataagctgcagcactaaaggcgtgcctcggaacactgatgtataaaaatcagcgatccagataaacgggcggaatgtgctgatcttgcataagcttagcacaataccgagtataagtccgataatagcagatacaacaacaatttttaatgtaattgccaagccttctaatataaaaggaatttgggggatcgttgctgaaaaatccaaattcatagcctttgtctccttttcttacaggaaaaaagtttcctattcaataaaaaggctcaacgaaaaagttgagccgcttttttttacttctcgccagtgaaccattttttcttcaatttctcaagctctccgttatcttccatttccttgagcgctttattgaatttgtctgtcagttcactgtcctttctgaaagcaattgctgaaccggcttcttccgctttcgcctcaggaatcacaaagccttgcaggtcatcatttgatttgaaatacccttctgcaacaatgtcttcaataatcgcggcatcgaaacggtcagatttgatttcctgcaccaaatcagaaattctgttgcggtcttctgttttaaaaccatattccggagaaagctctttccccttctcttcctgaatagagccaagctgaacgccaactgtttttcctttcaggtctttcaaagattgaatgccgctgtcttttttgctgacaatcatatggttcgctgtgtaatacacatcggaaaaatcaacttgttttttacgctcaggcgttggtgtcattcctgacagaacgagatccacctgttttgatttaagcgctgtaattaagctgttgaagtccatatcctgcacttcaatttcatagcctgccttctttgccagagcttttgccagctctacatcaaagccgacaatattatctccttctttatattcaaacggtttgtaatccgccgaagtacccataattaattttttctttccgctttctgaacctgaattgcttgagccgcacgcagttaatgcaaaggtgatgcaagcagctacaagtaataagagccattttttcatgatccatttcccccgtattcattacttttggtgtatttgaatatttattcgttaatttgtattttaaacagtttctcatttttatgcaatactatttttaaaaattatctttaagcttatctttccagtgatctcttctgatattactagataaaaattaaatcgctgtacaatccgattgaataatcccttaatatttattcatatatccttagaaatttatgcacaaaaaaacccgggctgctttgagcatccgggttgttcgtcttatacttcttcacaatattcttcaaaggcttcctgcagctttgccactacggccatcggctcatggccttcaatttcatgacgctctaccattttcatgatctttccgtctttcaaaatcgcaaaggacggagaagatggcggataaccttcaaaatagtcacgcgcacgcgctgtcgcttctttatcctgtccggcaaaaacggtgacgagctgatcaggtcttttatcatagtgaacggaatggtaggctgccggtcttgcaattcctccggcgcatccgcaaacagagtttaccatgacgagcgtcgttccttttttcgtaagtgcctcatccacctcttcggctgttttaagctcggtgtatccggcagctgttatttcttgtctcgcttggcggacaatatcattcataaataaattaaagtccatgttcaatgaagacctctcctttttcatcatctgttcttatgatagcaaggaaacgtccatatcggcaaatgactttgcttcgccgtgcactttttttgctcttcgtttactgcttacagaaaaaggggattatataactagaagtaaaataaaggagcagttgtatatgagccacaggaaagcgttactgattcataacggaaatgccggcaacaaaaatatagaaaaagcacttggtgctgtggtgccggttttatctcaccatttagatgaggtaattattaaacagacaaagaaaaaggatgatgcgtatcatttttgccgatccattgatgattctgtcgacaccgtcttcattctcggcggcgacggcacgatccatcaatgcataaatgctatcagcgctctagaaagaaaacccgcggtcggaattttgcccggcggcacgtgcaacgacttttcaagagtgcttggcatccctcaaaatcttgcaaaggctgcggaagcacttatgtcaggaaaaaaaaccagcgtagacgtatgtcagatgaatgaccgttattttttgaatttctgggggatcggcttaattgcagaaacgtcgaatcaaatcaacgaaacggaaaaagcattattgggaaaaatcagctattttacaagtgccttgcgaaccgtctcatccgctgcatcgtttccgatgacattaaaaattgatggagaagaaattaaagaagaagccgttatgctgcttgtgatgaatggccaatatattggaacgaatcgaattcctctccccgatgccagtattgaagatggcttacttgatgttctcatatgccgcaataccaacctcaccgcgttgcgggagctgatgagcatggaacagggttcaattgatcgttttaccggagagttgtcctatgtccaggcttcccgtatcgagattgaaacagacactgccaaaaaggcggatatggatggagaagtttatacacatacacccgcagtcattcaggtcctgccgcagcatatcgacatgcttgttcccgcaaatgaataactgtcatagggctttagaaagattttgcaaatccgttgactctcccctaggaggaggtcttacagtataagggatacacacttgaaaaaggggaagtcatatggagaagaaaaatattaccttaactatattattaaccaatttatttattgcttttttggggatcgggcttgtgattccagtaacgccgaccattatgaatgaattgcatttatcggggaccgcggtcggctatatggttgcctgcttcgctattacacagctcattgtctcaccaatagccggacgatgggttgatcgcttcgggcgcaagatcatgatcataatcggcctgttgttctttagtgtgtcggagtttttgttcggcattggaaaaacagttgagatgttatttatctcccgtatgctgggcggtatcagcgcagccttcattatgcccggggtcacggcttttattgcagatatcacgaccattaaaacacggccaaaagcgctcggttatatgtcagccgctatttcaacaggatttattatcggccccggcatcgggggatttttagcagaagtccattcccggctgccttttttctttgcggcagcttttgcactgttagcagccattttatcaatcctcacgctgcgcgagccggaacgaaaccctgaaaatcaggaaataaaaggacagaagacaggctttaaacgaatttttgcccccatgtatttcatagcttttctcattatcttaatttcgtcttttggtttagcatcatttgaatctttatttgcattattcgtggatcataaattcggatttacggccagcgacattgccattatgattacaggaggagcgattgttggcgccattacgcaagtcgtcttattcgaccgcttcacaagatggtttggcgaaatccatttaattcggtacagcttaattctctctacgagtctggtattcttgctgacaacagtacattcatatgttgcgattctgttggtgacagtcaccgtatttgtcggatttgatctcatgcggcctgcggtaacgacttacctgtcaaagattgcgggaaatgaacaggggtttgccggcggtatgaattcaatgtttacaagtatcggcaatgtattcgggcctattatcggcggaatgctgttcgatattgatgtaaactatcccttctactttgcaacggtcaccttagccatagggattgcactgaccattgcttggaaagcgcctgcacatcttaaagccagcacgtgataagaagcgcattctttgtgtactgcaaagatgcgcttcttctttatactgatgatagaaggagtgatggcatgaaggaatcgtattactcaattggggaagtatcaaaactggcaaacgtgtcgataaaagcgctccgttattacgataaaattgatttatttaaacccgcctacgtcgacccggataccagctaccgctattatacagattctcagctcattcatctggatttgatcaaatcattgaaatatatcggcacacctttagaagagatgaaaaaagcacaggacttagagatggaagaactgtttgctttttataccgagcaggagaggcaaatcagggagaaattagactttttatcagcactggagcagaccatttcattggtgaaaaagcggatgaaacggcagatggaatatcccgcgctcggtgaggtgtttgttttagatgaagaagaaatacggatcattcagacagaggcagaaggaatcgggcctgaaaacgtgctcaacgcctcctacagcaaattaaaaaaatttatcgagtcagcagatggatttacgaacaatagctacggcgctactttctcttttcagccctacaccagcattgatgaaatgacttaccgtcatattttcacgcctgtattgacgaataaacagatttcatcaattacgtcggatatggaaatcacaacaatccctaaagggaggtatgcgtgtatcgcgtataatttttcgcctgaacattattttctcaacttacagaagcttatcaaatatatcgcggaccgccaattaacagttgtcagtgatgtatacgagttaatcataccgattcattactccccgaaaaaacaagaagaatatcgagtcgaaatgaaaatacggatcgctgaataataaagcatagaaaaagagcattttttgaaacaaaacttcaaaaaatgctctttttgcttatttagtaaacagatgtcttctcgtcaatcgattctaaaatttgtttcactcgtccgaggaatcgtccgcacacgagaccgtcaagcactctgtgatctaatgacaggcacagattaaccatgtctctgacagcaatcatgccattgtccatgacaaccgggcgtttgacgatggattctacttgaagaatcgcagcctgagggtagttgataatgcccattgactgaacagagccgaacgaacctgtgttgttgacggtaaacgtgcctccctgcatgtcatctgcagtgagttttccgtctcttacttttttagctaggccggtaatgtctttcgcaatgcctttaattgttttttcatcagcgtttttaatcaccggaacaaataaagaatcctctgtggcaactgcaattgaaatattgatatcctttttctgaataattttgtcccccgcccacatgctattcatttgcgggaattcttttaacgcctgagcgaccgcttttacaaaaaaggcgaagaacgttaaattaaagccttctgtcttcttaaaggaatcttttatactgttgcgatatgcaaccatatttgtgacgtcgacttccatcatcgtccaagcatgcggaatttctgttttgcttcgcttcatattggaagcaattgcttttcttacacctgtgacagggatttctttatcaccggctgcagacgcaggatatgacgtctcttcttttggctcaggttttgatgcagacttcggtgcaggagctgctgttttcggctcctcaggattctgttcttgcacgccgcctgtttcaattaagcgctgaatatcttttcgtgtgatgcgcccgccggcacctgttcctgttacttgttcaagatcaatgctgtgctctccggccaaacggagtacagctggcgagtagcgctttttattgggctgatcagctgcttcggtactttttgcagcaggcgtctcagcggcttttgaagcagctggctgttcttgtttttgttcagccggattcgcgccttctgtttcaattttgcaaatcacttctccgacttgcagggtttggccttcttctcccacaagctctgttatcgtaccagtaaaagaagacggaacctctgcatttaccttatctgtcatgacttccgcgatcggatcgtatttgttcactttatcaccgggggcgacaagccatttgctgatcgtcccctctgttacgctttctccaagctgcggcatcgtcatttgttcaattgccatgattgtatcctcccttacgtctttaaaactccgctaattctctcatcgccgcttccactttatcagggttgaccataaagtatttttccattgtcggcgcataaggcatagccggaatatcaggacctgcaagccgtttgatcggcgcgtctaagtcgaacagacaatgctcggatataattgcggctacttcgctcatgatgctgccttcttttgtatcttctgtgaccaaaagaacctttccagttttggacgcagcttcgataatcgcttctttatcaagcgggtaaactgttcttaaatccaccacatgcgctgaaatgccatctttttcgagacgttctgcagcttgtaaggcaaagtggacacacagaccgtatgtgatcactgtgatgtcgtcgccttcccgttttacgtcagccttgccgattggcaggacataatcatcagccggaacctctccctttatcagacggtacgcccgcttgtgctcaaaaaacagcacggggtcttcgtcacgaactgcggcttttaagagccctttcgcgtcatatggtgttgatggcatgacaattttcagtccgggctggttggcgaaaattgcttcgactgattgagaatgatacaaggctccgtgcacgcctccgccgtatggcgctctgacgacaatcggacaactccagtcattgttgctgcggtagcgaattttagctgcttcagaaataatttggttgactgccggcataatgaaatcagcaaactgcatttcagcaatcggtctcattccgtacattgccgctccgataccgactcctgcgatcgcagattcagcaagcggcgtatccatcacgcgctcttccccaaattgttcatagagtccggctgtcgctttaaacacaccgccttttcttcctacatcttccccaaggacgaagacgcgagaatctcgttccatttcttctttcatcgccaaattgattgcatcaatatatgacattactgacatttgttcttcctccctacttcgcatacacataatcaagcgctgactcaggagctgcataaggggcgttctccgcttcatccgtcgcttcatttacgattgccataatttcatccagcatggtttgttctatctcatcggacagcaggcctgtttcctttaagtaagcttgataagtaagcaggggatcactttttttcgcttcctctacttcttcacgccctctgtagctgctgtcatcgtcatcactggaatgtggtgtaaggcggtaagaaatcgtttcaattaatgtcgggccttctcctctgcgtgccctttcgcgtgcttctttaaccgcttgataaacttccagcgggtcatttccattcacagttacgccaggcatcccatagcctatggcacggtcggaaatgttctcacatgcgacttgcttatcgtaaggcactgagattgcgtatttgttgttttcacacataaaaataaccggcagcttatggacagcggcaaagtttgccccttcatggaaatcgccttggtttgaagacccttccccgaatgtaacaaaggctgcgatatcctttttctccatacgtcccgcaagcgcaataccgactgcgtgcggcacttgcgttgtaaccggagatgatcccgtcacaatgcggtttttcttttgtccgaaatgtcctggcatctggcggcctcctgagttcggatctgctgcttttgcaaacccggacatcattaagtcctttgctgtcatgccaaacgcgagcacgacacccatgtctctgtagtacggcaatacataatccatttcacggtcaagtgcgaaagccgctcctacctgtgctgcttcctgtccttgacaagagattacaaatggaattttgccagaacggtttaacagccacattctttcatcgatttttcttgctaacagcatggttctatacatatcaacggcttcctgatcagtcagccctagtgcttgatgtcggtttatactcattcaagcccctcctttatgcttttaaaaatgaatggctttgccatctgcggcaagcgctgcttctccaattgcttcagaaagcgttggatgcgggtgaatcgtttgcccgacctcccacggcgttgcgtccagcactttggcaagacccgcttcagaaatcatgtcggtgacatgcgggccgatcatatgaacgccgagaatatcatctgtatctcggtccgccacgattttgacaaaaccgtcgctttcaccgtatacaagcgcttttccaatcgccataaatgggaacttgccgattttgacattatgcccgttcgcctttgcttcgtcttctgttaagccgacactggcagcttcagggcttgagtaaatgcacttcggcacaagcgtcggatcaagcggatgcggattgagacctgcaaaatgctcaacagcaataattccctcatgtgaagcaacgtgagctaactgcaggccaccgattacgtctccgattgcataaatatgagattccttcgtttggcagctttcattgactgaaatcatgccattttcagtaacaatatcggtgttctctaggccgatgccttcgatatttgcctgtctgccgatggaaacaagcattttctcagcagagtaggtaacggtttctccgtctttttccgcttgtatgctgatatcgtctgatgtttttgtcattgtgtcaggcagcacttttgcccctgttatgaactggatgccttttttcttaagaagactttccatttcttttgaaatctctagatcttcagtcggcaatatgcgatccgcgtattcaataaccgttaccttcacaccaaaatcatgaagcatagacgcccattcgataccgataacccctccgccgacaatgatgattgattgtggcagctcctccatttggagcgcctcatctgaagtcagtacagacttaccgtccgcttcaagacccggaagcattctcggtcttgatcctgttgcaatgatcacttgtttcgggatcagcatgtcattttcttcgccatttccccgctcaacagaaattgttcccggcagcggagagaagattgacggtccaagaatacgtccatatccggtgtacacgtcaatttttccttttttcattaaatgatttacacccgctgcaagcttatcaacaacggcttgcttacgctgctgcactttttcaaagttgagggacacgccagccgtttccaccccgaattgatcggcttcacgagctgtccggtatacctctgcgcttctaagcagcgctttactcgggatacagcctttatgcagacatgttcctccgagtttttccttttccacaacggctgtttttaagccgagctgagcggctctgatggccgcaacataaccgccggtaccgccgcccagaatgactacgtcatactcagttgccatggtgactcactcctgtctgtctattcaatacgatattgtttggattgctcttcgccctgcaatactctgagcgccccttgggcaagagactgcagttcattttcacccggatagactaaaacgtctgaaatccaatctatgtatgatctgatagcagaaacaaagcttttgccgtacgcaaggcctcccgtcagcacaatcgcttcaacttctccttttaacgctgcgctggctgccccgatttcctttgctacctgatatgccatggcatcataaatgaagcgggctttttcatcgcccccttgaatcatctgttccacttttactgcatcatttgtaccgagatagcctaaaagtccgccggtgccaacaagctttttcatgatttcttcttttgtatattcccctgaaaaacatagatcaacaagatctcccgcaggcactgttcctgctcgttcaggactgaatggtccctcgccgtgcaggccgttattgacatctaccactcgcccgcggtcatggacgccaattgtaatacctccgcccatatgggtaataatcattttcatgttctcatatcgtttgccaagagaggctgccgctttacgagcgacagctttttggtttaacgcatggaaaatgcttttccgttcaatttcaggcatgcctgaaactttcgcaagcactgacatttcgtctacgacaacagggtcgacgatatacgaagggatattcaggccgtcagcgatttcccgcgcgataatgccgccgagattagaagcatgctgaccggcgtaaccgcttttcaagtcctcaatcatgtcatcattcactacgtaggtcccgccttcaattggccggagaaggccgcctcttgcgcagactgcatcaaacttcgagatattgattccctgttcatgaagcgtttcgagaatatggtttttacgaaattcatactgatcaataattcggtcaaatcgctgcagctcttctatgttgtgtctcaatgttttttcaaaaatgcttctttcattatgaaaaacaccgattttcgttgaagttgagcctggattaattgtgagaatgcgtttttcgtcatgtagcactttcataacctccagatcaatttcttaacgtctgcttaatacactgtggccgttttgcaaaaactggcttcttgagcggcgcatgcgttcaatccgttcctctgccaagcggtcagccgctaaatatgcaggaatgccgtcacgctgagaaatctcaagtacacgctcgatattgccgtaaatgccttcaacttttttcaatgcacgttctgcattatagccgtaaagctcatctgccacgttgatgacaccgcccgcgttaatcacgtaatccggtgcataaacgatgcccatttcgtgaatttgatcaccatggcgtgtctcttttaattggttgttagccgcacctgcgatcactttcgccttcagctgtttaatggtgtcgtcgttaatagtcgcaccaagggcacatggcgcataaatatcgcagtcttgtgaataaatatcatcaggatctaccgcccgggcgccaaaatcttcaactgcacgctgtacagattgtttgttgatatccgtaacgattaagtttgctccttcttcatgcaggtggcggcaaaggttataggctacgttcccaacaccctgtacagcaatggtttttccttcaagagagtcggttccgaaagcagctttagctgctgccttcattcctctgtacaccccgtacgctgtgactggggacggatttccagaagagccgaaagcaggagaaatccctgtaacgtagtctgtttcatcatgaatgatatccatatcctcgaccgttgtacccacatcttcagccgtgatgtatctgccattcagcccttgaatatagcggccaaacgcgcggaacatttcttcatttttgtctttgcgcggatcgccgataatgactgtttttccgccgccaaggtttaagcctgccgccgcgttcttataggtcatgcctctagccaatctgagcgcatcttcaattgccgcttcttcattttcatatgtccacattctcgttccgccaagcgccggaccaagcgttgtatcatgaatcgcgataatcgcttttaatccagattgttcatcctggcagaataccaattgttcgtaatcgtatttctccatatatttaaaaagttccatgttcgttcctcctaatgtgtgtattcttcagatgcgcatattgccagcgcaatggaatacagtttattttcagcagagtccgctctgcttgttaaagcaatcggtgcttttgctcctgtaatgacagccgccacgctggccttggcaaaataaatcagtgatttatataaaatattgccggcctcaattgttgggacgagaaggatatctgcgttgcccgctacgtctcccgaaatttttttctgagccgcggcaatttgtgaaactgcgttatccaaagcaagcggtccatcaacaatgcagcctttgatctggccccttttgtacatttgagctagagcagctgcattcacggttgcttccatttttgggttcaccgtttcgaccgctgcaagagcagctgcttttggcatattgttccccactgcatgggccacatgaacggcattttgcaaaatctgccgaagctcttccagcgaaggagcaatattcattgccgaatctgtcacaaacatcagccggtcaaaatccggtatatcgaatacagccacgtgagaaaggacacttgctgaccgaagcccctcctgtctgttcaataccgctttaagcaaaacagaagtcggcacattgcctttcattaaaacgtccgctgttttatgatgcacagcacgaaccgctaatttcgccgattcctcaggagtatcggcatggacgatttccacttgatgcccttgcatggatgatgtcagctcgttcagttttgtgctgtcgcccgttaacaagaaacgggcagataggtgctcggctgccagctttacagcccggatcacttcctcatcctcagcatgagcaaccgcaatggtcttatttttgtgtatcgacgctttgccgattaaatctttcagcttcatctgttaccacctttcttgtttcgactccgccttttattatgcaagttccatgccagctcttaagggtgctgtcataccaggtatattgaaacattcgtgcagatgtttgcgtttattctgcaaattattgcatgccttcatttgcaaggccatatttatccattttgtaatataagttccgaatgctgacaccgagagcttttgctgtttttgtccggttaaaatgatgcttttcgagcgtttgctggatcaaatgtgcttcaaatttttctactgcgacagacagcttttcgccttcaatatccggaaaatcaaaacctgttccctgatctgtgtcattttctttttgctcaagttcgaatacaggcaagtgatctttttcaatccattccatatgcggattcagaaaaatcatggctcgtccaaggacattttcaagctcccggacattcccaggccaatggtaggcagataaggcgcgcaaggcttgttgtgagagcccttttacattcctgccgtaatcccggttgatcttttggataagtctgacgctcaatgcttcaatgtcctccaaccgctgccgcaaaggcgggatggagatcggatagcgattgatccggtaatacaggtcttcccggaatgttccgtccgccatcgccttttcaatatttacatttgtcgccgcaatcactctgacgttgacagggatcgctttcgtgccgcccactctgacgatttccttttcttgaaggacgcgtagcaatttggcctgcatattttgtgtcagctcaccgatttcatctaagaaaatactgccgttatttgcttcctcaaataaaccctttttaccgccgcgtttcgctcctgaaaatgcaccatcctcatagccgaacaattctgattcgagcaggttttcagaaagggctgcacaattcacgcgaataaatttattgtatttccggtcactttcgttatggatggcatgggcgaacagttcttttcctgttcctgattccccgcgcagcaagatggttgccggtgttttcgcaccgagcttcgcctgctcaagcgcaaccagcatttgctcgcttttgccaataatgtcgtcaaacgtgtatttcgcttcaagcgtgcgaataatttgtctggcgcgattaagctccgctgtcagcattttaatttcggaaacatcgtgaatcacgccgacgctgcctttcaaaatcccgtccacaatcaccggtgctacattaacgatgacctctttttcattcgggccgaccttcattctgacaccgcggacaggacgtcttgtttcaagcacctttaaatgcatgctttcgccttcggaaatatcagtgtttgcaggcttgccgatgacttctttttcagaaagccccgtcattttcgtatacgctttattgattagcaggccgatgccgttttcatcaacgacagaaatcgcctcatcggaggattgaataatcgcctccagcatcgtacggacctgctttaagttggtcacttcctctgccagctcgaccgcatcagtgatatctttaaacacacaaagagcaccgagcagacgtccgccttcatcaataatcggcagtcttgtggtcacaatttgcaaatgatcgcctaacagctgcttctggttgtattcaggcactcttgtttttaaaatccgcggcatcttcgtgctcggaatcacttcttttattgggcgcccaatgacttcctcacgtttttttccgaccattttttcggccatatggttaaagagaatgatttcttcattgatatcaataaaaatcattccatcatgggtggaattaaaaattctgtcatatttataggtttgctcttttagcatttgaatcaggtgctgcttttcttccatcagctgaaaaacgatgtatgccatttttcccggcatgacaatggtatcttcatgctttctttgaaggagctcgtcaaacacggcttgatcgccggtggtatgaatgacgatatccggtttttgttgtatgtaaggtttccaatcagatgatacggcaatcccatacttttctgcttctttcaatcccggcgcctcggggtctttgtcaactacggcaatgatatctatgatggctgttttaatcagaatatgtaataacgccgttccccttttgccggcacctactatcagtaccttttgcatcccgatacccctttgtatgaaaaaatttgcacacctatttattccgttgcaataatttgcacaaccctatgttaccacgttttcttctcttgacaaaatattttttccgctggacaataaaggaaatgaaaagataaaggggttttctgaagatgagccgacttcttgcgcttttaatattagtcatccccggggctatttctgctttaggcattaaactgatgagagatacacttttcggccatacaatcaagccattttcagctctttggctccaagggttgtcaggattcatcttttttgcgatcggcctctatgtgctggccgggttcattttatacagagacagaaaacgcaatcaagtcagctcgcgattcagaaaacgatagctgaaaaaaagccggagaatgctccggctttttttgttgcattattcgtcaggcaaaacggtcttggcaatcgttttgtctaacgcttcatagtcataataagaaatcgtatcgtacagttcttttcgtgtctgcatatcatgaagtccttctttttgtgagccgtgctccttcatcaaaccaaacatccgctcacaagcttttgccgccgctcgaagcgaggtgacaggatatatcaccatgtgaaaccccatatcttcgaattcatcggcacgataatatggcgttttcccaaattcagtcatattcgcaaggagcggaacggggatacgctcagcaaactggcggaattcattctccgcctgtagcgcttccgggaaaattgcgtccgctcccgcctcaatgtaagcctctgaacgttttattgcggcatcaagcccttcctgcgccctggcatcagtacgggcaacaacaataagggagggtgccgcttgtttaatggcttttattttttgcgccatttcctttatcggaactagctgtttgccatttaaatgtccgcatttttttgggagctgctggtcttctatttgaacggctgctacccttgcttcaagcatctcccgggctgttcgggcggcatttaagacaccgccaaatcccgtatcgatatccacaagcagaggcagatcagctgcacgtacaagatctttggcccgttcagctatctctgccgatgtgatgatccctaaatcaggcagccccctgctggctgtataggcagcaccggacaaataaatagcagaaaaaccggcttctttcgcaagcaaagcggccatcccgtcatgggcgccgggaatttgaagaatgtccggtgctgacatcagcttgcggaaacgcccggcaagctcctcttgtgacgattgcttattgacgatccacgacatgaaacaaatcccccttttacatgcagaacatgtctacgaattcatttacgcgcatcgtttgtaatgtctcatagctggtacagcgctcataaatgtgtttgtgctgtttatcaggaaaatgggttttgagattgtcagaaaacttttccagcagtttcggcactgcttcctctcttcgaaaacgatggccgaggggaaactcacattccaccatttccgtgctcgttccgtctttaaaatgaacctgaacggcatttgagatggaacgtttatcaggttttaaataatcctcggtatatgttttattttcagtcacttccattttatcacgaagtttatctattctcggatcactcgctgtttcagcttcataatgctgtgcggtgatatcaccaaaaagcaaaccgattgctgtaatgtattggagacagtgatcacggtctgccggattgtggagcgggccttttttatcaatgatacggatagcggattcatgcgttctgatgacaactcggtcaatctcgtcaatccggttctttacctgcgggtgaagaatgacggcgcactccgccgctgtctgggcgtgaaattccgcaggataagacactttaaataacacattttccatgacataagcgtcaagcggacgggcaagcttgatctctttcttattgaataaaacgtcttggaacccccaacccggtgcactcagggctgtcggataacccatttccccttttaacgacatcagcgccaaatgaacacctctgctcgttgcatctcctgccgcccatgatttacgcgagcctgtattcggtgaatggcggtatgtcctcaatgctgcattgtcaatccatgcattcgaaagcgcatttttgatttcttctcttccgccgcccaaaagctttgccgcaacagcggttgtcgcaactttgacaaacagcacatggtcaaggccaactcgatttaagctgttttctaacgccagcacaccttggatctcgtgtgctttgatcatcatctcaagtacgtcgcgtactgttaacggctcttttccttcagacagcctcactcttgatacataatcagcagcggcaaggattcctcccaagttatcggatggatgcccccactccgccgccagccacgtatcgttgtaatcgagccagcgaatcatgcagccgatattaaacgctgccctcacaggatcgagaacatatgacgttcccggcactttgcttccattcggcacagtcgttcctggaacaatcgggccaagcagctttgtgcattccggataccgtagcgccaagatcccgcagcccagggtatccagcaatacatgccccgctgttgtatacgcttcggcactagtaatctctttctcaagcacatagtctgtgatttcttcgataacacgatccgttttcggcattctaccagttcctttcatggttttgtttgatatcgcgggcccatgtaactgacgcggggacggaagagccgattattggcatgctgttcgatcacatgggcgcataaaccggacgttctcgcgctgaaaaagatcggcgtatataaaggaatcggtatgccgagcatccaatacactggggcagcatagtaatccaaattcgggtaaagccctttttccttctccatcagccgctcacccgcttcgcacatctcatataaacgatggtcaccggctttatcgcataattgctgcagcgcctctttcatcatgagtgctctcgggtccatttttttcatatacacccggtggccgaagcccatgattttttcttttcttttcagttttgtttgcaaaagctgctcaaaatcagatgtcgtttttgcctccaaaagcaaatacatcacagcttcgtttgctcctccgtgaagattccctttcagggaagcgacagccccagtcaaagccccataaagatctgaatgtgtagatgcaatgaccctggccgcaaaggttgaattcggcatctcatgctcactgtacaggacgagcgaccggtcaaaaatctgttcttccaatgaagacggcaatttccctgtcatcatgtagagaaaattcgcactgtaggatagggtttgaagcggaagaatcggttctttcttattaatgatcctgtagctggcagcagtgagggcaggcattttcccaagaagctgataggcgcgttctttgtttgcggaaggagaccgatcatcaatttgccgatcatagccagcaagtgccgacaggccggtacgcagactatccattggatgagtgtcctcagggagcagctcaagcagacggagatgatcagcaggcaggcttgaggcactgattattttacgttccagcgtctccatttcactttcttctggcagcctgccctccagcaataaatggacaagctccagatagctttttgtttcagaaagctctattaaatcatagcctcttatcaaaatctggctggactgcgtgtcaagataagaaatatgagtttctgccgcaatcacaccgtccaaccctggagaatattgctgtttctcctccatatcctcaacctccgtttttgcgttttttgtctatcaggttccgccaagcaaatacttggaaataatcagtctttgaatctcgttcgtcccttcataaatttgcgtcacctttgcatcgcgaagcaggcgctcaactggataatccttcatatagccatatcccccataaatttgaacggcgtctaacgccgcctttacggctgcatcggaagcaaattgtttagccatagacgcttcttttccacagtttaggccgcggttatgaaggtctgcagcgtggtagacaagatgtcttgccgcctcagctctagtcgccatatcagccagcttaaatgaaatggcttgattggctgcgatcggccttccaaattgcactcgctgcttcgcataatcaacggcatgctcaagagccgcctctgcaattccgagggcctgtgccgcaatgccgatccggccgacatttaaattcgccatggcaatgtgaaagccatccccctctttgccaagcaaattggcttcaggcacttctgcattatcaaaaatcagttccgtagtattggagccataaagccccagctttctttctttttttccaacggtaaaaccgggtgtgtttttttcaacaataaaagccgaaatcccgtgcctgccttgatctggagctgttaaagcaaatgtgatatagatatcagctgctccgccattcgttatgaatattttcgatccgtttaatagatatttgccgttctttttgattgctgttgtgcggaggctcccggcatccgaccccgagtgaggctccgttagtgcaaatgcgcccaaatggtctcctgacgcgagctttggtatatatttcatcttctgttcttcgttgccgaagtacagaatcggattcgtgccgactgaggtatgaacggagagaatcacgccgacagccgcgctgattctagaaatctcatgaatcgccaaaatataagaaacaacgtctgccccgacaccgccgtactgttccggcaccggtattcccatcaggccgtgttcgcccatttttttgatcagctgaaagggaaattcgtccgttttctccatgatttccgcagcgggagcaatttcttttcgtgcaaaatcacgcaccatttttcgcatcatgacttgctcttgggttacatgcaactcggccacccccggatggaatagacttcaggaagtcctctcctcatagtcataaaaaccgcgtccgctctttttgccaagccagcctgctttgacatacttgcggagcagcgggcatggacggtatttggaatcgccaaggcctgagtgaaggacttccataattgataaacacgtatccagtccgataaaatccgctaatgcaagcggacccatcggatgattcatgcccagcttcatcacttcatctattgcctccggcttcgccactccctcatacacgcaatagatggcttcattaatcattggaagaagcacacggttggaaacaaacccaggaaaatcattgacttctaccgctgttttccccatcttttccgctaatgccataacatctaaggccgtttcttctgatgtagccaagcctcgaatcacttctaccagcttcattacagggacgggattcataaaatgcatgccaataacccgttgaggccggtttgttacagcagcgatttctgtaataggcaaggaagatgtattgctggccaaaatcgtatgaggcgggcaaatgcgatcaagtgttttaaacatctcagtttttgccgccatgttttctgcgatagcctcaatcacaatgtccgcatgctctgcctcctcaagcgtttgagaaatcgaaatgcggttgattacgctcttcacttccgtctcggtcctttttcctttctcagcatcacgggccagctgtttcttcagccgtttcaatcctgcctccgcggcctctggattcacatcatacatccgcacataaaagcccgcgccggcagctgtttgagcaattccgcttcccatctgacctgcgccagctaccatgatttgtttgatttccattcaaatcccctttttcatcatgttttaatgaacctgcactaagacggcgtctccctgtgctgccccgctgcaaatagcggcaacgcccagaccccctccccggcgctttaattcataaacaagcgtcatgagaattctcgccccgctcgcgccgatcgggtggccgagcgcgatcgcaccgccattcacatttactttttcaagatcgaaacctacgattttttcacatgtcaaaacaactgaagcaaaagcttcatttacttcaaacaagtcaatatcttggacagttaaaccattctttttcaggagcttgttaatagcaaaccccggcgctgccgccagctcgtgcgctggcattcccgtagttgaaaaaccaagaattgtagccagaggccgtttgccaagctcagcagctttttcctcagacatcagcacgaacgcgccggctccgtcattgactccaggagcattgccggctgtgatagaaccgtcacttgcataaatcggagcaagttttgcgagctgatccagacttgtgtcacggcgaatcgcttcatctttatcaacaacgtttggttttccttttcgaccgatccagttgacgggaacaatttcatcctgaaacttcccttcatcggcggccttagctgcccttgcatgacttctcaacgcccattcgtcctgctctcttcgtgagattgcatattccttggcagctgtatttccgtgaacagccatgtgcacctcgtcaaatgcgcacgttaatccgtcatacaccattaagtccctaagctcgccgtcccccatccgtgctccccagcgcccggcgggaacggcatacggaatattgctcatgctttccatcccccccgcaacaagtatgtccgcatcctgcgcccgaatcatttgatcacataaagtgacagcgcgaaggccggaagcacagactttattcagtgtttctgacggcacactccaaggcattcccgccagacgggcagcttgacgggaaggtatctgccctgagccggcctggacaaccatgcccatgacgtttccttctacatcatctccagagactccagcccgttgcagcgcctccttcatcacaatgcccccaagctcagcagctttcacctctttcaatactccgccgaatttgccaaatggcgttcttgcagcacttacaatgactgttttcctcatggtttcacctcattcagaagatagacagcgcttacaatttctagttgtcttctatgaatgtatgctttgaaacgggcatgaatgaatgaaaaaagaaggctgcgtcaaacagcctccttctaacaactattcatttttcagcaatgccgaagccttttctggaaagtcggtaaacatgccgtctgctcccgcttcaatgagacgcttcatatcttccggacgattgactgtatacggccttaccttaatcaaaccgttcctcattttcttcagtacttcatctgtgacccctgggctgtttaacttcgggtgatagccggaagccggaatagacgcgatatatcgatctgcctgataaagcacatctgaagttaatactgcccgttcgatatgcggtgcaagccgggcgcacagcgccaagctgtcatgattaaacgtggataggatgactctgtcctctacattaaatcgcttcactgcctccagcactttttcttccattccctcatagcggatcacgctgttttttaattcaatgttgatgagaaaatccttttttaccgcccacgagagcacatcttctagcagcggcacttttatatcgctgtacgcttgatcgtgaccagcggccgcatttgcagtctttacctcatcataggctgtatccttcacgaatcctttaagtgatgtcgtgcgattaagtctttcatcatgaattacaacaatgcgtccgtctttcgtcagctgtacatcaagctctatcccatccgctccggcttcaattcctttttcaaatgcaagcattgtattttcgggaaattgacctgatgccccccgatgggcaaaaatctttgtcatcgtttcacctcaaaccctaaagttttctccattatacttattttgtcggctccactctaggattaaggctgtatcaatctactgatcataataagaatcaatgccgttgacaatcgcatctgcggccttttgctggtattcttcacttcccagcttgtccgcgtcagagctgttcgtgataaacccaagctccgccaacacacttggcatttgtgaatatgtaatgacgtaaaagtctgattctttcacgcccctgtctctcgtttgtaaggaagaaacgagctctgactgaatatcggatgcgagacgccggctgttctccccttcataatcagattgaaaatacgtttctgttcctgaagctgaagcaacccctgaattcacatgaatgctgacaaaaaggtcagcctgattggcacttgccttagccactctttcctccaaggtcagaaaatgatcgtcagaccgggatgcaacaggattggctacctcctcttttagtttgtctgtcacatgctctgagacagccaaattaatatccttttcaaagagcccgtttccgaccgctccactatcttcaccgccgtgtccggcatcaatatacactgttttcccttctatcggctctgctgcctgtgcacaaggcgcgagcgtcaaagccaatccgcacagcgccaagctcctccataacattctcaacttactccctccggtcacgagttctttcgcagctgaatatcttccagctgtaaagttccattatccttctttgtatatttcaccaggacatgtgtctgatctggcagtgattcacattcatcacgtttatccttcggaacttgtatcatggtttcttctccattaagagaaaccgcaatcgtatgaggatcagccgagccaatgtattttccctcttcggtaaaccttggcactgagtcatccgcacttgcaacactgcaccccgaaagaaagagcgcagtaaacagcaaaagaaccgtttgtttcacatgaccacctcttcctgatgtttggcttttatctttgaccagaatggcgaatttgtaaagacaacgcgaatgcaggcgagcaagttccatgattttcaaaagggctatacgacccgatcatttcctgttgttagaaagataacgagcagatttgtctatgaggatggctctaattgaggcgtcaattagaaaaaattagcggaaagaagcaactttttattcattttaaaaaatttgagaatagggtgagcaaatcgtttgacgggtgggtcagccaagcgtaaccttttaaaggatatttactttattgaaagaagttaaaaccatgaaaaaattcgttctgctgctggcggcagctgtcatcacatgctccatcggccaccaaatcagcggcggctacaaaggccccgaaaaagagcggcgaaaacatcactctgcactcaagatattcagtcggtaaagcagatcaattgcattaatttttacatataggctagaatatgtgcgaatccaaacgaaagaagatgatcaaatgaatcctaagtataagccactttttgaaccatttacgtttaaaagcggcgttacaatcaacaaccggatcgcagtagcaccgatgactcattacgcttctaatgaagacggtacaatatctgaagcggagctcgactacatcatcccccgttcaaaagagatgggaatggtgattacagcctgcgcaaatgttacaccggacggaaaagcattccccgggcagccggccatccatgacgattccaacattccaggtttaaaaaagttagcacaagccattcaggcacaaggcgctaaagctgttgtacaaattcatcacggcggtattgagtgcccgtctgagctcgttcctcaacaggatgttgtggggccaagtgacgtgtttgataacggcaaacaaattgctcgcgcattaacagaagaagaagtggaaaacattgtgaaggcgtttggagaagcgacaagacgcgccattgaagtcggctttgacggtgtcgaaattcacggtgcaaacggctacttaattcagcagttttattctccgaaaaccaaccagcgcacggatcgctggggaggaagcgatgaaaaacgattagccttcccgctcgctattgtcgatgaagtgaaaaaagccgcttcagaacatgcgaagggtgcgttcttagtcggctaccgcctgtctccggaagaacctgagacaccgggattgacaatgactgaaacttatacgcttgttgatgctttaggggataaagaattggattatcttcatatctcactgatggacgtgaactcaaaagcgcgccgcggtgcagatccgactcgcacacgcatggacttattgaatgaacgtgtcggaaacaaagtgccgctgatcgccgtcggttccatccattccgctgatgacgcgcttgccgtcatcgaaaacggtattccgctggtcgctatgggacgcgaaattctagttgaccctaactggacggtaaaagtaaaagaaggccgtgaaaagcaaatcgaaacagtgatcaaaggcacagataaagaaaaatatcatttgcctgaaccgctatggcaagcaattgtgaacacacaaggctgggtgccttataaagattaatgtgcaaagactgccgaaacgattcggcagtcttttttccctttatataaatagtttgtgtacacatctaaacagcaaaagaaagagctccccaccaacttcgaaaagaaaatccaggaaaaacccctcacgctttcttgcttttttctttttcattcgtacgtctcctttttacatgaatacgccttacttacgattttgcaggagaaaggtttcattttataacggacacatctagggtcgatcatgcttcgtgatcctataagatgtatgaatggaccaagagtgcaggtaataccgccatttgctttccttacttttcaaacctatcctttactatatgcggatacttaatattcttctcccatactaacaaatgtccccaaaacaaaacgcctcctatttatcagcgcaaactaataaataaaagacgtttgatttaatgaccacttaataagctcatgtttaagaagccttatgttctaatctcagcttatccgcaaccattgcaatgaattccgaatttgtcggtttagcttttgtcatgctgacagtataaccgaacaacgaggaaatggaatcaatgtttcctctgctccatgccacttcaattgcatggcggatcgctctttctacacggcttgcggttgtgttgaattttttggcgatgtccggatagaggacttttgtaatgctgccgagcaattcgatgtcattgtataccattgagattgcttcgcgcagatagagatagcctttaatatgggctgggacgccgatttcatggataatgcttgtgatgctcgcgtcgagatttttcttctttggttcaggctggctgctgcgtataatactgctttgcgatgatggcgcacgatgcgtcacactgctggcatttccgctgacctggcggatatggccgacaaggttttccatatcaaacggtttgagaataaagtaggacgcgcctaaatcgacggcctttttcgtgacatcttcctgtccaaaggctgtcagcataatgacattcggctgttttttcagatctgattccctcagcctctctaaaaccgcaagtccgtctaaatgcggcataataatatctaatacgagcacatcgggatctttttctttaaacagcgacaggcattcctgtccgttataagcaacgccgatcacttccatgtcttcctgtccttctatatattcacttaacaggcttaccagctctcgattatcatcagcaacacaaactttaattttctccacgtttcttcctccccaaatgtagttaacaggattcacccttgctacatgtttacattcgacaaaaccgctatataccctctaaaaaaatcataatcaccaatattagtggcatatctttgttattctatgtttttctctgtttttcgactaaaaatgaaatttgacaaacaaggaaacgtgaatttgtcgaaaaatcttcttttgtatattttaccgtatgtattctgagaagtgaagagggatcaaaataaaaaaactgccggaaactccggcagtcagcttgctttttcttttccataaatatcgattcctgcttctgacagcatccattcaatatgaacaccgtagccgcttgtcgggtcatttacaaatacatgggtgacagcaccgatcacttttccattttgaatgatcgggcttccgctcatcccctgtacgatgcctcctgtttctttcaacagtcttggatcggtaattttcaacaccattccttttgtcgcagggaatttttgcggcgttgtgctgacgatttcaatatcgaatttttctactttgtcatcatcaataacggttaaaatttcagccggcccttttttgacttcggtagaaaacgcaaccggcaatgcttgatctgatatgttgttttgaatcggctgatgcagtgtgccgaaaatcccaaacgggctgtttctgttaatatccccgatcgttttgcgttctgaggaaaatcgcgccagtttttctcccggattaccgcctgtccctttttcaattgatgttacagtggatttaacgatttctccattctccactacaattggtttctttgtgtccatatcggaaatcacgtggccaagtgctccgtatttttttgttttcggttcataaaaggtcatagtgccgatgccggcagcagaatctctgatatataacccgattctgtatttgccttctccttcatccttttctgggatcagcttcgttttgattttctgtttatcacgtttgatcagtaagtctaaagattcaccagttttcccagccttttgaataaatggggctacatcattcattttttcaattttctgtccattcatctcaataatgatgtcgcccgcctcaattcctgccgtttctcccggagattttttgccttcacttgtattgatttgatgaaatccgacgacaagaacaccgacggaatgaagttttacaccgattgattgtccgccaggtataacttttaaatcaggaagaacatgcacttttgtttttttaattggaaatccggcaagatcatataccaattctgactcacctgattttttgcccgtcaccttgatttcatgcggatctttctttactgtaaacgcttctgaggattctgatgtctgagcgtttaccgataaactcgtttcaatcgcttgtgtttgggtttcaaatactctcatttgcgttggaatcagtaaatattcttttagcggtttgcataaacctacacttaataacgaaacaaggagaattaaacctactgcttttctgatgttatcgggcattcactacttcactctcctcgctcctatcccacaccttctttatgacttgctgctacatcatttaattttgccttctgacggcttatttataactgtcatatgaagaaaaacattggatatactgatgaacgaatggatgtgcacgaaaaaaataagctgcgcttctcgcgcagcttacccagttgttttgacttgatccgcttgttttaaaagttctttcgcatggcgtttcgttaaatcggttacctcgacacctgcaatcatgcgcccgatttccgctaccttttcctgcttagacagcggcttgacacgtgtcgtcgttctaccgtcttttaactccttcgcaatataaagatgcgtatcggccatggcagccacctgaggcaggtgtgtaatgcacagcacttgtgaacctattgacaccttatggatcttctcagcgattgcctgtgcgaccctgccgcttacaccggtatcaacctcatcaaaaatgatcgatgtcacatcctgttgtgaggagaaaatgctttttatggcaagcatcacccgtgacagctctccacctgaagcgactttcgaaagggattttagcggctcgcctgtattggttgaaattaaaaacttcaccaggtcaatcccttgttcagtcagctgaacgggctggccgtttacaagcggcgcctcttcattgcgtgacgctgttctgaccttaaattccgtatcaaaagttgatttttccatgtacaggctttttaattcccgatgaatctcatcagccagctttttcgcccatgtttttcggatttgtgacacatttgccgcttccactgcgacatctttgccgacggagtcaagctcctttttcaagctttgaaggtggctgtccctgttttcaatttggtcaatctcttcttcaattttagaagcatattccaaaatgtcttcaacagtggcaccgtattttcgtttcagctgtttgatttcattaagtcgcgtctcaatatagttcaggcgttccggatcaaattcaagctcatccagcatatttctcatctgaaatgtggcatcctcaagcaaatagtaggagttcgaaacactttcagacatttttttcagcggttcgtttatatcagatatatcttcaagctgcgctgatgccattccaacccagtccaatccgccctgctcactgcgaagcgcgttatatgcattttgcagcgactcatatatcttctcaaagtttgaaatttgctggcgctcttcttggagctgttcatcttcgttaagctcaagctttgccgattcgatttcttcgagctgaaattgaataagatcaagacgatgggccatttcctgttcgctttcagaaagctgcttaagctttttgagcagcttcacataccgctggtacccttcctgatacgttttgagcgcgctttccacttcggccccggcaaacttgtccaaaagctggagatgattttcgtcttccattaacagctggttatcgtgctgcccgtgaatatctaataaaagcctgccgatctctcttagtgaagcaatcgtgacaagcttgccattgacacggcaaacgcttttcccgctcgtgctgatatcccttctcatgacgatcatttcgtctgaaacgtcgattccctgctcagcgcatacgcctaaaacaggatggccgctctccaacagaaacagcccttcaagttcggcttttgcttccccatatctaacaaattcagatgatccgcggcctccgactaaaagagaaatggcatctatgatgatggatttgccggctccggtttctcctgttaaaaccgtaagcccgcgttcaaaagaaaccgtcagttcctcaataatggcaaagtttttaatcgatagttcagctaacaaacagcattacacctcttatctttgttagattttctgttacagcagttcaaggagcctgttttttacgccttctgtatcttcaggagtccggcaaataattaaaatcgtatcatctccgcaaatggtccccatcatttcatcccagtccaaattgtccatcagcgccccgattgcctgggcattgcccggcatcgttttcagcacaatcatatggcttgctgagtctattttcacaaatgcgtccatcaatgcccgctttagctttgacagcggattgaaacgctggtccgccggaagactgtatttgtaagaaccattatttgtaggcacttttacaaggtgaagttctttaatatcccgtgataccgtggcctgcgttactttgtatccatcctgctttagcatgtcgaccaattcatcctgtgtttcgatttcattgcttgtaatgatctctctgattttaatatgcctctggcctttgttcatgtaagcacctctatttccaagcttatctgttcttttatgttatatgattctctgcacattgtacatgaatgcagaaaaaaggaataatagcgccctattattccggtacatctgcttttttttcttttaacgtcttatgtgcttcttctacaacgcgcatgatctcttcttccggcagttcctggccttcctgtccctctcccggccaatgcaaatgaaggagaaactcaatatttccgtctcctcccgtgattggagaaaatgacaagcctttacagatatagccttcagcggcagaaaaactgatcattcgcttgagcacatcagcatgcactttaggatctctaacaatcccttttttgccgacggattcccgtcccgcttcaaactgaggcttaactaaagccatgcagtcgctgcccggtacgagcaaagtccttaggacaggcaggatgagccgcagtgaaataaaggacacatcaattgtggcaaactccggcatgccctttgtaaagtctgccggtgttgcataacgaaagttcgtccgttccatcacgacgacccgttcatcctgtctaagcttccatgcaagctgattatagcctacatccacagcgtatgactgtttagctccattttgcaaagcgcagtccgtaaaaccgccggtggaggagccaatatcaatcataattttatctttgacagagacgggaaattccttcaacgctttttcgagctttaagccgcccctgctcacatacctcagcgggtttcctttgacagttaacggaaggtcgcggtcaattttttctccaggcttgtccaagcggttttcgtttgaatagacgatccccgccataatggctcttttggctttttcacgcgtttccgccagccctctttccactaataatacatctaatcgttctttctttgacgtcatgatccaattcctttgtgtgtctttggcggcatcagtaatctaatacgatttgccacctgctgttttgtcagtccaatttcctcaagaagcgctgttacacttccgtgttcaataaaccgatcaggtatacccattctgtcaatcggagtatgatattcaccttgatcatgagcgaattctaaaatcgagcttccgaaaccgccttctaagaccgcttcttcaattgttaaaattggcaagccttcttttaggatactcttcatcatcttttcatcaatcggcttaataaaacgcgcattcacaacgcgcacggaaaggccttctttctgcagctcttcggctgcttcaatcgccatttcgattgttgtgccgaatgttaagatgacagcatcgttccccggacgcagcacctcccacgtaccgatcggaatcgttttcaactgttcatccatttttacgccgagtccgtttccgcgcggaaaacgcatcgctatcgggccttcgtcatagctaagtgctgtatgaaccatatgctggccttcattttcgtctttcggcatcattaagaccatgtttggaatgtggcgcataaacgcaatatcaaacacgccttgatgtgtctctccatcagcgccaacgagtcctgcacggtcaattccaataaacacattggcgttttggcggcagatgtcatggacaacttggtcatatgccctttgcaggaaggttgagtaaatcgccaaaaacggcttcataccctgcattgccatagctgccgccatcgttgcggcatgctgttctgcgattcctacgtcgaacatccggtcagggaattcctttgcgaaaccttcaagctttgaaccgacaggcatagccggcgtaatggctacaatgcgtccgtcctcgcgcgccattcgctgcacagttccgctgacaagaccgctccacgaaggagctgcggctttcggctttacaaagtcaccggtattaattttatatggtccggtaccatgccatgtcccaatcgtatcggtctcagccggtttgtaccccttcccttttttcgtgatgacatgcagaagaacagggcctttcgtttttttggcgtattgaagattctcaatcagctcatgataagaatgtccgtccactggacccaaatacgtaaaaccgagctcctcgaaaaacattccggagacgagcatgtatttcaggctgtctttgactcgttccgccgtggcggcaagcttgcccccaactgccggaatctttttaaataagtattcaagctcatctttgacccactggtatttccccgcagtacggagccgtccgagcatagagtgaatggcaccgacatttggtgcaatactcatttcattatcattaaggatgacaatcatgtcttttttctcgtcgccgatgtggttaagggcttcgagcgccattccgccggtcagcgcgccgtcaccaattatcggaataatatattcatccgttcctttaatatcacgggcagctgccattcccatcgcgcctgacagagaagtcgagctgtgcccggtttcccaaacatcgtgctcgctttcactccgctttggaaatccgcaaagccctttgtactggcgaagcgtcgcgaattcttttcctcgtcctgtcagcagcttatggacatacgattgatggcctacatcccataaaaatttgtctttcgggctgttaaattccttatgcagagcaatagtaagctctacgacacctaagtttgggccgatgtggccgccggaagcggataaacttgtaattaaaaactgacggatttcatcacttaatttctctaattcatcaatggacatgttttttaaaaacgacgggtcctgtattgataaaagatccaaagcggatcaactcactttcagcatgaatttctgcaatgatacatgtcttttgcatgccgagctgacaataatctcagacataaaaaaagacaaacgcgcttttccttttcatttttcatataaactgcttacattttaccatacctcgtgcagccgcttcaaattaggatcgttttagtgatctcttgccgcaattaaatcacaaagctcatataaaaggtctttttgaagagagagtccgccgatcaatcgcttcgcctcttttatatgaacatccaatttatgtttggccccttccaatgaaagaagcgacgggtatgtcgatttgtcatttgtggtatccgagccgacacgtttgccgattttctcttcactgccttctaaatctaaaatatcgtctctgatttgaaatccgattccaatgtggctgctgaaggtacgcagtgtttcaatgtcttcctcaggcgcatcagccaaaatagcaccggcgattacacaaaagccaaggagcttggcagttttccgttcatgaatggattcgagctcttcaagcgtgacttgtcggttttccgcttccatatcagctacttgcccaccgaccatgccttcggtgcctgccgctgaaatcagttcattcacaagccgcaggcgcttttctgctgacacctcgtctgacacgtgggaggtaatcagcttaaagctttctgtgagcagcccgtcacccgctaatactgccgtcgcttcaccaaacactttatggtttgtcggcttcccgcggcgcaaatcgtcatcatccatgcatggaagatcatcatgaattaacgaatacgtgtgaatcatttcgacagcacagcccaccggaatgccgtctttttcgctttttccatatgcatttaaaacagccagtacaatcagaggccgcagccgctttccgccggcctgtagagaatacagcatagatttctttaatgagtccggcatatcaagcttttctgtatagacagaaagctgattttcaattgtttttttccggtccgccagaaagctcgttaatttatttgtcaccttcgtcttcctcctgaacactgaaaggtgccagttcgccgtcttcttttaaaatgaagtccatttgcttttcgactttttgcagcttttcatggcacatttttgacagagccatgccttcttggaaatagttaatggcttgctctagaggcacatctccctcttcaagctttgatacaatgctctcaagccctttcatcgcttcttcaaatgtcatgttttcattttttttcacgtctgtcatttttcttcccctctcttttctaatacttcacaggtcagcacgccatccttcagcttgacttcaagccggtcctgctcttctatttgactgacacttttaatgagtttatcttctttataagccaagctgtatcctctttccatcacttgaagaggacttagtgcattcagcttgccaagaacggtttgaaattgggaatgcagctgcttcatttggatattcatattttttctcagctgatttgtttgttcctggtatcgtgttctcgcttgtttcagctgttcatgaggatgcagtgcctctaatctgtacgtttcacgctccagctgtctgcttttccgatctaaaagagcggtcagctgtgcttgaaactgctggtacgcgaggtcaaactgctgctctttttgcgcatacaaacgctttggaaaacgaaaggcataggacgattgcagcgtttgaatccgttcttttttctggccgaggtgctgctgcatcgctcttgtcattctgacttccgctgtttttgtccgttcgattaaatcagtggtatgaggcacagcaatctcagctgctcctgtcggcgtcgcagctctgatatcggcgacaaaatcactaatcgtaaaatccgtctcatgtccgactgccgatataatcggaatattggaagcaaagatggcgcgtgctacaatttcttcattgaatgcccacagttcttctatcgaaccgccgcctctcccgacaattaatacgtcgcaaatctctttttcatttgcctcttcaatgcgcgtaacgatggatctgctcgcattttcaccttgtacgagcgctggaagaacaatgacttttacaaggggatatcttctttttagagttgtaataacgtctctgacagcggcacccgttggagatgtcacaaccccgattgtggctggaaatgcggggatttgttttttgtagcggtcgtcaaataaaccttctccggcaagcttcttttttaattcttcgtacgctaaataaagcgctccaatcccgtcaggctgcatttctttggcatataattgatagtttccgctcggttcatatacggaaattccgcctctgaccagcactttcattccgttttcaggtttaaaaggcagacgctcgctttgtctcgcgaacatcaccgactgcattcttgcgttttcgtcttttaaagtgaaataaatatgccctcgtgtgtgtatctttacattcgacaattcgcctttaatccaaatattttcaaggtgaggatctacatcgaattttcgttttatatactttgtcagcgctgagacggtcacatacgctgcttcacccatgtctaaaaactcctctcctaagcattcctgcaccataactaaagaaaacccgccctggctttaggagcctgaagaagcgggtatcgtgctcatattcaaggcgggcaaacatttcgcctgtgaatatctccaattatctatgataacgtacgtttcgcagatttaacagtattatgcgcaagcatcgtgatggtcatcggacctactccgcccggaaccggcgtgatgaaggacgctttttcctttgccccttcaaattcaacgtctccgcaaagctttccgttttccagacggttaacgccgacgtcaatgacaacagcgccctctttgatctggtctgcactgatgaagttggctctgccgactgccaccaccaggatgtccgcttttttcgtatgttcagtaatattttctgttcttgaatgacagtaagtaaccgtcgcgttttcatttaataaaagctggccgacaggtttgccgacaatgttgcttcggccgactacaacaacctctttaccggaaaggtcaatattggttttcttcaaaagctcaacaattccatgaggcgtgcaaggaagaaacgtatcttcgccaagcagcattttccctacgtttaacggatgaaaaccgtctacatctttatcaggggagatacgttcgatcaccgctttttcagaaatatggtctgggagcggaagctgaacgagaatgccatgaaactcagggtcttggttatattgatcaataatggaaagcagttcagcttctgtgaggctgctgtcaaattgatcgagcttgaaattcattcccattgtttctgccgcttttttctttcctcgcacgtaagagtgagaagcaggatcatctccaatcaaaataaccgccagtccgggagtgacgccttgctttttaagctcttctacctcttttgccaattgttcgcgtttttctctagccgtttcttttccgtcgatgattgttgcagtcattttctttcctcctatgattgttcaatatcagatttaatgttagaaagaaccccgtttacaaactttgtcgctttgtcatcaccaaaccgttttgccagctcaatcgcttcgttcatggagacattcaccggaatgtcttcggcatatgccatttcatatgctgccaggcgcaaaatcgcacggtcaacattggcaatccgatcgagcttccaattcaccagatgcttggagatcatttcatccagctggtcttggtgttccaataccccgtgtacaagctgttcaaagaaaggatctgttttttcttcatccagtgcgtgttctatggcttcattcactgcaatatcgctgacatcaatttgaaatagtgcctgcaaagctttttctcttgctgttcttcttttcattttctttctcctttgatcctctttatccgcttgtcgttaagccacaaagagatcataacatatttttttcgtatccgcatattgaaatcaaggtttttttaccctattaccgaatattttcacacaccttaatatgattattcggatttcacgttcatgaagaaactcggctatgtaagccggctttcttcatgctttgaaataaagggtaacgtgtaaaaaaaccaaagggccgccctccccttggtttcgtgttaagccatttacatttcttcgtcgatttggacttcttgggcttttgtgtcaaattgaatgccgacgatgtgaatattgatctcgttaatcgaaagagacgtcatatttaataaggtttgacgaatgttttcctgaacggatgctgcaactttcggaatcgaaacgccaaatgtaacgacacagtatacatcgatcgtaattccgtcatccgccaggtcgactttgacacctttgccatgattcactttgccaaagcgctcaacgacgcctgtcgcaaagtttccgcgcatttcggcaactccatcaacttctgatgctgcaatgccggcaatgacctcaatgacctccggtgcaatctcaaccttacccaaatgcgtatcttcgtgatccattttaagcaagctgttgtctttcattcaattcacctccgtaaaaattatgagcccattacatcatatgtttctaaaaatttcgtattaaactctccgctcacaaatgtttcgtgttcaagcagttttaaatggaaagggattgttgtctcaatgccttcgatgacgaattcgctcaatgcgcgcttcatgcgggcaatcgcttcatccctcgtttttccgtatgtgattacctttgcaatcatgctgtcatagtacggtgggatggaatagccagggtacgcagctgaatcgacacggacaccaagaccgccaggaggcaggtacattttaatttcaccaggtgacggcatgaaatttttacttgggttttctgcgttgattcggcattcgatggcccagccttcaaattcaacatcttcttgcttgaggctcagttccattcctgatgccactttgatttgttccttgatcaggtcagttcccgtcaccatttctgtgactgggtgctccacctgaattctcgtgttcatttccatgaagtaatagcgctgttcattgtagtcatagataaattcaactgttccagcacctgtatagccaaccgcttttgcagcctttaccgctgcatctcccatttgctccctgatttctgaatcaagggcaggagatggtgattcttccaaaagcttttgcaggcgtctttggatcgagcagtcgcgttcgcccaaatggatcgtatttccgtagttatcagcaagcacttggatctcaacgtggcgaaaatcttctatgtatttttcgatgtatacacctggattcccaaatgcagttgccgcttcctgctgtgtaatcttaatgccattaatcagttcctcttcagtgcgggcaaccctaattccttttccgcctccgcctgcggtggcttttataattacaggatacccaatttcattagcaagcgaaaccgcttcttccacattttctataattccctgtgaacccggtacgattggcacgccggcctgtttcatcgtttcccgcgcaacgtcttttgttcccatttttgaaatggcgtcagcgctcgggccgacaaacgtgacattcacttcttcacataattcagcgaaatcagcattttcagctaaaaatccgtatcccggatgaatggcgtccgtgccagtcagctttgcaacactcacaatatttgtaacgtttaaatagctgtcttttgatgctttcggtccgatacaaaaagcttcatcggccatttgaacatgaagggcatctttatcagcttctgaataaacagcgacagtctcaattccgagctctctgcaggctctgatgattctgacagcaatttctcctctgttggcgatcaatagctttttaatcatgttcagtctccttactccgcttttacaagaaatagaggttgtccgtattcgaccagctggccgttttctactaatacttcaacgatttcgcctttcacttctgcttcgatttcgttgaaaagcttcatcgcttctacaatgcagacaactgtgttttcatttacttttgaaccggctgttacatacgggccagcttccggtgatgaagaagcataaaatgttcctaccattggtgaagtgattttatgcagattctcatcttgctttggtgcttcttgggcaggtgccgctgcttgctgcgcttgcggctgaactgcctgcggagcctgtgcttgtacaggtgctgccggtgcctgctgcatgacttgaaccgtgcctgcttcgtgttttttcagttttaaggatacaccttcattttcatatacgaattcgtcaattgtagactcgtcaattgctttaatcagctcgtggatttctttgatatttaacattcaatcgcactcctatgtatgaaatttctttttttataggttactgctaaaagtacatactatgttcatcttacaggagcggacttttgaattcaactctaatatgacagcaacgcaaaaagcccgcttgtttagcgggcttttttccctcattcttatttagagggttcaaatgtgacagcgacatctttcattgttttgatttcttttgccacaaggtctataatggctgtcgccttcgatttagagtgtttgtctgatttgactgtaatattgattttatctccttcagcattaacaagcgcatcctcgtaaccttgtgttttaatcagcgtttccagctgtttttctgttccttccacttcactgagagccgtcattttatcgtatgcttcgcttttctccttggctgttgcatcatcgcttgacacaatggcattcagctcttctctttctttgcttctggcatcttctaaatcaagacggtacgttgtaaacaaatcatcatcggctgtttccgtaacaacagttcctttttcactggcttcagcggatgtttccttgtctgctgatgaatctttcgttccctttgttccatcttcttttcctttttcagtttctgtaccgcttttttccttcgtgtcttgcttggcaggcgctttttcagttgcgacctctccgctgtcagacgcgcttttttcactttgcatctgcacggcgtttttgctttccggcgacatgatatagtagacgcttaacaccacgacaagactgagcattgttaatagccaaacggtttgttttttaagcatttatgaatcctcctttatttttttaggggcaaccgcaacccggtggcttggaacatccaggacccgtgtcaccgcttcgataatggtttgttttatttgaacgttgtccactccttgagcaacaacgagtacaccgcgtatatcaggttttttcgtttggacgacgacaggtgtttctttatcgccgtttttgatcatgacgatttcttcctccgatgtttggtctgtaacgcttcttgttccgccttctttgtcagtttcttcggtggttgtatttttgtttgatttgtttttttcgtatactttcagcgacgttgcatctacattcacgacaaccgagacatcgtccacaccaatgattgtttcaagaatttctttcagctgattttcgtattctttttcatagtcatcgatcgagtctttaggtttatcagattttgaggctttaaacacttcagctgttttctctttgctgcccgcggaatgttgcgatgatacggccgttatcgttttggcgttttctgttttctcaggtgaagaaaacagctggctgacaagcataaaggaaactccgagaacaaaaacgaatagaaagtaatgatatttggtcagcttcggcttttcgccgtccttcgtttgtcccggaagaaactgctttttcaatacattccataatccgtttttattcattgccgacactctccccgccttccatatgaaccgtaattttctcacttccgatttcccaaatgtccgcgagctgcgtttgtatctgtttggcttctttttgttcggctgcttctttcgttacgtatgcatgatctgtatcaatgtggaccggcgcgaccgtttggaccgttttttcagaagacggggccatatacacgctgattgttttaatatcctcttctgaatctaccttttctcctgccgtgagtttgatgcggcctactttatattcatcatgactgaatctctcctccgctttcttttttagttggacagccatttcttctagaatatatgcgcgctgggaagcttgtatttctattttttttgaattgatttgattttttatgtcggcagactctgactgcccgttttttgtgagatattcaaagatgatttcggggtctgtcttgaaaagtttaaaaatcggcgtaagcatgacgacaatcaagagcaggctgactaccatttttgcgtacttttgcatgctggagctcggcagcagcatatcaatcacaattgcaaataggataaacaacacgatggtggtaagccattccgttaaaaaactcattcgcctgcctccttcatttcatcatcatcgtgaggtttccggctgtgattatgacagtaaggcttaaaaaaaacatgagagacacaatagcgagagctgcaaaaatataaatgacgcttttgctgatgacgtcgaggcaggtgatgacgggcccgcctcctagcggctgaagaatcgcggctgccagcttataaataaaagcgagggaaagcactttgattgccggaaatgccgcgatacagatcaaaatagcaacaccgagaatccctaccgtatttttcagcagtaaagaggcgctgattactgtatctgttgcgtctgtaaacattcggccaagcacaggaataaaatttccggttataaatttagccgtcctgagcgtaatgccgtctgtcactgcagctgaggctccctgaacagagatgacgccgagaaagatggtaagaaaaacagccagcgctccgatagcgatatttctgagcaggttagccagctgcgttactttgtattgttcggtcatggtgctgacaatgctcagaatcgctgataagaaaatcagcggcatgacgatattctgaatcaagagaccgctcgtgttcatcaggaagaggataacaggatgaaagaaggcagcagatacagctccgcctgaggaagccaaaagcgccaagaggagcggaatgagcgccaggataaagctggtcatcgtctgaatcgcctcagttgcatagttaattgccacatgaaagctattaagcgcaaggataatcagcaccatgtacacaattgagtaagcgaccttactgacggtgctttgctgaaaagcattttgcagaagctgcagaatgacgcaaaaaatcgtgagcaaaatcaatgtgcccagcagctttccgttggcaagcacttcatgaaacaaataagaaaagagagctttcagccattcttgcggtgagaatgatttatcgccattgataaactccattaagctgcctttttggctttccggcagcagtccgccgtattctgtcataatgtcattccaaaattccccgatcttatctgtttcaagcgaggctgctgtcctttccgctaattgctcagctgtttcagcatggtcttccgtttgttctgcattaccagctgcttgtacaatttctgcacggcctgctatgatcagcacggccaaaagcaaaacccattgaaagcgcttcaatctaccgcctcctttcggttatgacatagaaggtataagtccgagaatcgtttcgataatgacggttaaaataggcacagccataacgagaattaaaatttttcccgccaattctattttcgaggcgatggccccttggccggcatcttttgtgagctgcgccccgaattcagcaatataggcgattccgataatctttaaaatggtttcaacatagaccatgttgacatttgcattaatcgcaattttttctatcattcgaataatgtcgtagatttggtctactaaataaagaaaaatggcacatccggcaaaaacgacgattaaaaacgcaaaagtcggcttttgttcttttacaattaaagaaaggaaggtggcgatcagccctaaacctacaatttgaacaatgtcaatctgcaagcccccctatccttggaataaaaacacagcttttatctttttaaataggtcatctacaatcgtggcgaccataaataaaatatagataaaacctaacagcgtcacccactgagcgtattctttcttgcccatctgatccaatatcgtgtgtaaaaaagcgaccacgattcctactccggcaatttgaaatatgacattcacgtctactcccattttatttttgctcccctcacgtttacatcaatagaagaatgagtaacaagcccgctaaaaagcccaaactttttatcattttttcatttttcgcttgcgcctgctcagcatccgcttcagaggcttccaaatgtgtcagcgccagcttgatgtgcttttgctgagagattcgatcatgaatcccgagcgtctcgccaaactgcttcagcacttcgtattcgctttttttcaaagacagggtgtcccataccttctttaagctttgctcccacgccgttttcgcggaatcacttcccttgtccagctgatcactgaatgcggaaaaaagagctgaaacaggctgtgcgagctgtttggcaatctgctgtgaagcagtatgaagcggtgtatggccgtacatgatttcagcctcgagggattgaagcgccgcacgcagctggcggatttgccgcggccgttctgtataaatcttcgccatctcaaaacctgtccatgttgtcgctaccacaataaatacagcgcccagcagcttcagcatgttttcacgcccgtcgtcctagacagcacatttccgtctttgtcataaatttggctcactgtgcccggcccttttgctcttgataattccaaatagcggtcaaaggctctttcttcccacaaacgcttcaatgaaggccgcttcatcaggtcggatatgctccagccatgcgccgatacaattactgaaacaccagcatgcagtgcctccagaagtgcatctgtatcttccatacgcccgatttcatcgacaatcatcacctcagggctcatggatcgaatcatcatcatcagcccttcagcttttggacaggcgtctaacacgtcaattctctgaccaaattgatgttgcggaatgccgcgaagacatccggcaatttctgaccgttcatcgacgattcctgtctttacgggcagcatgggttttttgccggtgcttgagagcctcgcaaggtcccggagaagtgttgttttgccggtttggggcggtccgataatcagcgtattcagccagctgtcttgatataagtatggaagcagcggctccgcaatccccagcttttcccgggcaattcgtatattaaaagatgcgatgtcacggaggcctttcacacctccgttttccgtaatgactctgcccgccagtccgactctgtggccgcctctgatcgtgacataccctttcttcagctcttcttcaagagtatacatactatagttgctaagccggctcaggatcagatgggcatcctctgccgtgcccgcataggacaaataaacaggttgtcctcttcgaatcaattcaacagggcggttgatccgaattctgacttcttcgatttccagccattgttgttccggtatttcagaaagggcgtttttcatggattcggggagaacctcagcgatttcattcaacagagcctcctcctttctaccgattggcttctttaaaatgtatgatgtgaggcagactttatgacaagcctctctttatttatgaacacccgccaaaatcaaaacaacacccgtaaaaatcagaatcagctttgcatacgaaagctgcccggcaatttggtagattccgacagtcatcgtaatgataaaaatcaacggaccgacaatagcgagaatgctgttaaccacaaccgccttccggacatcgttggtcacaagcatgacaattgctgccgtcagctcaatcatagaggataaaactcgtaatcccgccattgttaaaacagtagaattgatatttccaagtaaaaatttcatagcactctcccaacctcccatttttttatatgatatgctctagcttggtgaagtagtcttgtcattttcgtataaaagaaagattctgtttttgggcacaaaaaaagcctgctcccatttgggaacagacttctttttttctttctatgctcttgaaacgtaagaaccgtctgatgtattgacaacaagtgtgtcgccttcattcacaaagaacggcacgtttacaacaagcccggtttcagttttcgcaggttttgtaccgcctgacgctgtatcacctttaataccaggttcagtttcaacaactttcagctcaactgtgtttggaagttcgataccaagtgtttcatcctggtacatcatgatatgcacagacatgttttctagcaggtattttaattcttcttcgatttgagttgcgctcagttcaagctgctcataagaagaagtatccataaatacgtgctgatctccgtttgcatatagatattgcattgttttggtttcgatttgcgctttcgctactttttcaccagcgcggaatgttttttcctgaatggcgccagtgcgaaggttgcggagtttagagcggacaaatgccgcaccttttccaggttttacgtgctggaagtcaacgacgcgccaaatgccgccatctacttcaattgttaatcctgtacggaaatcgttaactgaaatcatgtttaatgtcctcctatattccaatcacaaaataataagttcttttggggaatgggtgattgtccggttgccgttttctgtaatcacgatgtcatcttcaatgcggacaccgcctgtttctggtatgtaaatgcccggctccactgtgaccaccatacccggttcaaggatagctgaagatctgacggataatcccggagattcatgaacttccatgccgagcccgtgcccggttgaatggccgaaatagtcaccgtagccttttacagcaatatgatcccttgtgagggcgtcagcctcttttcctgtcattcccggcttaatatgtgcgacgccaagcgcctgagcatcaaatacaacctgatagatctccttcaattgatcactgggctgacctacagcgaccgtccgggtaatatcagaacaatatcctttataataagcgccaaaatcaagcgtaacaaggtctccgctttcaatcagtttgtcactggccacaccgtgcggaaggcttgaacgaaggcctgaggcgacaatcatatcaaaagaagagctgtctgctccctggcttctcatataaaactccagctcattggcaacagcgatttcagaaataccgggtttcataaacgtcaagatatgtctgaaggcatcatctgcaatcttcgcagcttcctctaatatcttaatctcttcactagacttaatcaagcgcaacttttccacggattcagccacaggcactaattcggcatcactgataacggcgctgtatgaagcgtaagtgccatatgtcatgctgttctgttcaaagccgagacgcttgatgccaaacgattcaacagtgtcggcagtggtctgaatcaagctgccaccatgttcaatgatctcaaaaccctttacctgaaccttcgcctgctcagtataacgaaaatccgtaataaacgctgctttgtcacccgatataacagccaaacccgccgaacctgtaaaccctgtcatatagcgtacattcgtgctgcttgtaatcagcatgccgtcaattcccagctgtccaaacaggtttcttaatttctctagcttcatcttgattctcccccttgctggcttaataagtagcgaacagcaagcttgtagccttcagctccaagaccgacaatctgccctttcgcaacaggagcgataaccgactgatgcctgaattcttccctggcgtataagtttgataaatgcacctctaccacaggaagactgatgcttgaaacagcatccctgatcgcatagctgtaatgactcagggcgccggggttcagaacaatcccgctgtattgctcctcagcctcatgtatcgcatctatcaaatcaccttcgtgattagactggaagaaagtgagctggatatgtaaggcttcagcaaactgaaaaagatctgtttcaatatcggtcagtgtctggcggccgaatacttcaggctcacgactcccaagccggttaacattcggtccgttcaaaatcaaaaaatgaggcacataatctctcctttttgcgagggtttctcatgtaaaaaatgttcacttctcgtgaacattttatcatactggaaaaggattatacactattctctatgcattcccagcgcacgtgcaagcttttccgaattcagctcattgtattcaaatgaaatggaatacccgacaaacagcccgtaaagcaaataaatgcaaatggtcgtaataattgtatctgatgtcagttcggtcaccgtgcgcacatctggaaaaatcggattaaaaacaaaaaacacgagcagccaaagcaccaagccgtataaaatacccggccacattgtttttaaacgtttcaatagaagaaaataaagaaatgctgcgccaattgaaattactccaatcaaaatgatgctgattaccgttcccagcccatgttttttccactctccgagcacaaacggctgcaatatcatattcgggctgatttcggaaaaatgaaacaaatatgcgatataagcaacgaaactccaaagtacgcctccgcaaaaacctgttgccgccaccctgccggccattgaaacaggcggcttttgcttctcattcaattcttcattttgttctgtatctttttcgcttgtcatcatggcacctccagttaaagtgtgcccaaaaaaagaaatgtcaataaaaaagctcacactttttgacagctgcgagtaaaatttgaaaataacgggtataatgcatgtagaaaaagcaaggctatggcaattttttcagcttgtcaatctagaggtttagcgctgtttcctgtacaatagagtgaaaggaaatggttagcaatcctaaagaaataggcaggttgataatatgtcaaaacataaagttccgcccgcttacggcgggcaggctgttgtggaaggcgttatgtttggcggaaagcatcattacgttacagccatcagaagaacggatggaagcattgacttttttaagcttccacgcaaacacaacccgaaactgaacatcgtgaaaaagatcccgtttttacgggggatcgcggccattatcgaagcgagtgcaaacggcacaaagcatttgaatttttcaagcgaacgttacgggctcgatccatctgaagacgagacacttgagcaggaagaaaaaaaatcctccgggctgtctatgtatctcagcctcgcagttataggcgtcctatcatttttgttcagtaaattcgtatttacattggttccagttttcttagctgaactgacaaggccgattttttcctcggacacggcgcaaatcgcggttgaaagcctgtttaagttgattttgctgctcggttacatctattttttgtccatgacaccgcttattaaaagagtgtttcaatatcatggagccgaacataaagtcataaactgttatgaacagaatttgccaattactgtggagaacgtccaaaaccaatctcggcttcattaccgctgcggatcaagctttattttatttacgattattgtcggcatgtttgtttatttactcgttccgacagatccgctttggctgcgtgttatagatcgtgtcgcactgataccggtcgtgcttggtatatcctttgaagttctgcagctgaccaacaaagtgcgtgacattcccggtctgaaattacttgggtacccgggactgtggcttcagctgttaaccacaaaggaacctaaggatgaacaggttgaagttgccatcgaaagctttaacgaacttctcagactcgaagcattgtctgagcaaaatcagaagccttctcacaacgtcatctaaaatccgttgccctgctattactttcggaggtggacagttatgaatcatcgtgtacaacctattattgctgtattaattgcgctgggagcgttcggtttcctctatgtgctggtaaccaatcccggagaaatggcaaaaatggcggtaaccgtcatcgtggcaggtatcattatttattttattgtgaaatatgtaatgaatcgaaatgcgggcagcgaaggagcagccttcaaaaaagcggcgaaacaatcgcggcgccggatgaaagaacataaagcaaaacaccgcgccggacataagggacgtgtcagccacctgcgaagcgttccgagcgccagcaagcctaagccgatgattctcaagaaaaaaagccagactcagctgactgttatagaagggaaaaaaaataaaaagaaaaacagagcgcttttttaataggtccactgctttaaaaacagctctgtccgtcttttacctagctcaatcagggctagttttttttgttgtgttaaatgaaaatcagttgccattacgccatcaaccgggagaaaaatgatattttgttcatagcgtgatgcaatgtgccttgcgtcatgggcatccttcatcgtttcaaacagggcgccgaacagttcaaaagcgttgcggatattttttttcggacgctctctttcacgcggcgcaagcgtcacaccgatcacagggcgctttctttcctttgaaaacagccagatggggaaattgcttaacacacctccgtcgacaaccgtggcggtgcctgtgtccgtttttaattttatcggttcaaaaaaatacggaatgctgcagctcattctgaccgctctggcaaccgggaacatatcgggatttaacccgtaacgggccaaatcgtccggcaaaacaatcatggtgccgtttgtcagatcagaagcaataaggcgcagagaccctttctgcaaatcgccgaaaacccttatgcctttcgctcttaacagatcagcaatccattcttctatcgtatcgcctttgtataagccaagacgccagtagatggacacccactggagcatttttaaggggagaaaagagtacctttgatccagcaatttctctccgtccacttcttcaattaaagcgtggatttccttactggtgtaacctgacgcaatgaaagcggcaataatggcgcccgcgcttgtacccgcaacccttttaaagcggaagcctttttcctcaagcgcttcataagcgcctgcaagcgcaatgccttttactcctccgccggaaaacacaccgtcaatatacatctcattccctccccctccatccgatcgtttattaccattttaagaaaacacgcgcagaaatagaccaactaatgacgggtggcgtcagcgtatcaaaaaagacggcctccttcgagaccgcctttttactgattatgatgttctgttttcttttggattgatttcagatcttttttacgggcatcatcttcttcaaaatattgaacaagatccccgatgcgatcaatactgttccagcttaaatgatgttcgattccttcgacatcgttatatattttctcttcatcaacaccaatgattcttaaaaactgctcaagcaattcatgtctgtataccagccgtttgcctatttttttccctttagacgttaacacgagaccgcgatatttttcataaattaaatattcgtctttatctagtttttgaaccatttttgttacagaggagggatggactgccaatgcttccgcgatatcggaaactcgtgcatatcctttttcttcaatcagcatataaatctgttcaatataatcttccatacttggtgttgtcatcgaaaccctcccaaaaagcaccttaactttataaaccattacaagtttacactaatgaacttgaaaaaacaaggatgctccgcgggtcaaaagccctgtttaccgcttataattccattcatctgaagcgtactttgtttcagccaagtgatgaacaaaatcaagctcttcctgagaaagttcatatggctccaaatgaatgttaagacctgtttcaaatccttctttaaaggctttacgagcctcatccatcgtcacccgcttttcggtgagttcattaatggcaaccgctttgtttttgaaattgcgctgcatccgctctcttactctttcacttggatataagaacagatcgaacagcttgtcctcatctaaatcaagaagaatggagccatgctgaagaatcacacctttttgtctcgtttgcgcgcttcccgccaccttgcgcccctcaaccactagttcataccacgaaggcgcgtcaaaacaaacagatgaccgcggattttttaagctttctttttctttttcagttctcgggatggcaaagtaagcgtccagaccgagatttctaaagccttgaagtatgccttctgaaataacccggtaagcctcagtaacagtcgccggcatctcggggtgctcttccgaaacaattacgctgtatgtcagttcctgatcgtgcagcacacctctcccgccggtcgggcgtctgacgaatccgagattatatttatgtactgcttcaaaattgatttcctttttaatattttgaaaataccctacagaaagtgtcgccggattccagccgtaaaaacggataaccggggggattttcttttcgctgtgccaatataaaagcgcttcatcaagcgccatattgaatgcaggacttgcattgcctgagtctataaaccgccaagtttctttttgcattttaagaccttccttaccgttttaatagaatcagtttatcaaactgtcgggaaaatgaaaaatattttagttccattatagatgacaatcacgctgtgctttactataatagtatttgtcgaaaacggctctatgaccttgttttatgaagcagggttttgattttatatgctaaaggagtagaatcacattgtctaatatgatcgttttgattatttttgctgcgtttatcatctatatgattgcttcatatgtctatcagcagcgaattatgaaaacacttaccgaagaagaattccgcgcgggttaccgcaaagcgcagcttattgacgttcgtgagccaaatgagtttgagggcggacatattttaggcgcccgcaacatcccgctttcccagctgaaacagagaaaaaatgagatccgtacggacaagcctgtttacctgtactgccaaaacagtgtccgcagcggacgcgcggcacaaaccctgcgcaaaaacggctgcactgagatttacaacctaaaaggcggctttaaaaaatggggcggaaagattaaagcgaagaaataaagcaaacagctgtctggtagacagctgtttttatttatctttctaccgcctcgtatctgagcaccgggtgtctcgccgcttttgtttcatccattctttttacaatcgttgtatgcggggcctcctgaacaagttccggattctcctccgcttcttttgcgatttgaatcatagcatcaataaacgcgtccagtgtttcctttgattcggtctctgtcggctcgatcatgatgcattcttcaacattaagcgggaaataaatcgtcggcggatgatagccgaaatcaagcagccgttttgcaatatcaagcgtacgcactcccagctttttctgccgcttccctgataatacaaattcatgcttgcaatggcggtcaaacggaagatcgtaataaggcgcgagttttctcatcatataattggcgtttaacactgcgttctcagtaacagcctttaatccgtcaggccccatggagcgaatatacgtatacgctctcacattaatgccaaagttgccgtaatacggcttcacacggccgatcgcatgagggcggtcataatcaaacgtaaagcgcccttcttttttgactaaaactggctttggcaaataaggaatcagatcttgttttacgccgacagggcctgagccggggcctccgccgccatgagggcctgtgaatgttttatgcaggttgaggtgcaccacgtcaaatcccatatcaccaggtctcgccttgcttaaaacggcatttaaattagcgccgtcataatacagtttcccccccgcttggtgtacaatttccgccatctctgtaatctgctcctcaaacaagccgagcgtgttcggattcgtcagcataagagctgcagtttcttcattcactgctctttttaaatcctctaaatcaacaagccctttttcattcgatttcaccgtaacggtttcaaagcctgctactgttgctgatgcaggattcgtcccatgcgcggaatcagggacaatgaccttcgtccgcttgaaatccccgcgagcttcatgataggcacggatcatcatcagccccgtccattcgccgtgcgctccggcagcaggctgaagcgtaacctcatccattcccgttatttcttcaaggtgtttgcttaaatcatataaaagctctaatgcgccttgcaccgtgtcttcatcctgaagaggatgaatcgcagcaaaaccaggaatacgtgcgattttttcattgattttcggattatatttcatcgtgcaagaaccaagaggataaaaaccggaatccaccccgtgattgcgtttggacagcgctgtataatggcgcatgatgtccagctctgaaacctccggcagcgctgcgtcttcgtcacgaatataggtgtctgacaagaggtcccccaattcgatttccggtacatcgagctccggcagactatagccgattcggccttctcttgaaagttcaaaaataagtgcctggtcctgattactcatggcgatcccccaattcctgaatgagtgcgtcaatttcttcttttgttctcagctccgttacagcaatcagcatatggcagtccagctccggatacgtcaacccaagatcatatccgccaatcatgccttttgccagcaaacgcttgttcacagctctcaccggctcatccagtttgatgacaaattcattaaacatcggcccgtcaaacataacagtaaggcctgctttttttgcttcttgctttgcatagttggcttttaagagattttggcgggctatatcttttacgccgttttttccgagagcagtcatggccactgatgctgcaagcgcatttaaagcttggttcgagcatatatttgatgttgctttatcccggcggatatgctgctccctggcttgcagggtaagcacaaagcctctttttccgttttcgtcttccgtttgtccgacgagacggcccggcacctttctcattaattttttagtaacggcaaaaaagccgcaatgcgggccgccgtatgctgaaggaatgccgaaaggctgcgcatcaccgacgacgatatcagactgaaacttgcccggcggagtgagaagacctagcgccagcgggttagctgaaacaataaacatggatttcccttgatgagcgataggctcaatatcctttagcggctcgatcctgccgaaaaaattcgggtactgaacgatcactgcggctgtgttctcgcaaacggtttggcgcaatgcatcaagatccgtaacgccatccgcagcgggtacttcaacaacatcaatatactgaccttttgcgtacgttttcagcacctctcgcgattcaggatgcacggtttttgacacaacaatttttttctttttcgtgtggcctgaagcaagcattgctgcttctgccaaggctgttccgccgtcatacatcgaggagttggcgatatccatgcctgtcagttcacagatcatcgtttggaattcaaaaatagcctggagctctccttgtgaaatctctggctgataaggcgtatatgcggtataaaactcagagcgcgaaatgacatgatccacaatgacaggctgatagtggtcatatacacccgctcctaagaaagaagcgtattgtacggtatcacgatttttagaggccagctttgtcagttctcttgttaattctgtttctgatttcgcttttttgatttgatactcttttttatatttgacgttttccggtatatcagcaaataaatcatcgatgctgcttacgccgatagtagcaagcatctcctgtttatccttttctgttgcgggcaaataacggtgcttcatgtgttgtctcctctctccaagaaaaaatattagcgtttataaaatggtgttttgacaacctttgctttcactaattttttgcgaatctctacatctacaacagtcccgatctcacttgtttccgaatcaattaaggcaaggccgacgtttttccctaatgtcggtgactgcgtgccggttgtcacctttccgacagacttgccattttggaaaacctcatatccgtgccgcggtatccctttttcaatcatttcgagaccgacaagtttgcgcttcgctccgttttctttttgttcactcaatactgacttaccgaaaaagtcagactccttattgtgctttacagcaaagcctatacctgcttcaatcggtgtaatatcccgggtcagctcctgaccgtagagcgggagcttcgcttcaaaccggagtgtatcacgtgcaccaagaccgcatggaatcaatccgtatgcatcccctgcatcgatgatttttttccaaatatgcatagcatcatcactgcggcagtaaatttcatacccgtcttctcccgtatagccagtgcgtgaaataagtgctttgcggccgctgatatcggcttcatcaataaacgcaaacggctttaatgcagacacatctgcatctgtcagattttttaagaccgcttctgctttcggtccctgtacagccaagagcgcgatttgatctgactggttgtcaatctgtacatcacctgctgcatgttctttcatccaagccaagtctttatctatattagaagcattaatgacaagcagatagcggttctcttctttttgatagataagcaaatcatcgacggttccgccatccgggtaacacatcgctgtatattgagcacggcctggcgttaacgcggaaacatcatttgtcatcaatctttgcaaaaaagacagactgtcgttccctgacacttcgacttctcccatatgagatacatcaaacaaaccggctgcagttcggacagcctcgtgttctttttttatagaagaaaattgaacaggaagctcccagcctccaaaatcaatcgtttttcctccatattccttatacaggtcaaataacggcgttctgttcagcatctaattcctcccctttatcaacggcgcagctaaaaacatacaaaaaaggacagagaaacacctcatgtaaaatgaaggttctctgtcctggcacctgaaagtttactttgcatacgcaaagacgtcccctttggtggtttgcgcatccgcacaaacactctccagagttgcgtcgagcaagagttcttttgcctgagagattcactccgcagtttgctccttcggcgcctgtatcccgaggttttcggtcaggtctctccccttgctgtcattcgctcatattttcatgctgttatggacatactatagcaatatcttacatcaaatacatactcatatcctaccatcatcactatatgctgggcaacagcaatttgggcagatttttcttatattattcatcttaagaatcgaagaattagaaaggcggtttcaaagcaatgaatacagaaatgatctacgatgcaaaatggcctgaagaatttgctgaaagactgaaaaacgatggcccttgggcaaactgggaactgtacaagctctctgcagaaatccagaaaacattagcaattccagattttgaaggcttacgggctcctttatatctgccttcctttacgccgctcccccaccagcttgaagtggcgcaaaaagtggttgaaaaaatgaacgggaaagcgattttagcagatgaggttggtctcgggaaaacggtggaagccggtttaattttaaaagaatatatgattcgcggattagcaaaaaaaattttgatccttgtgcccgcttcccttgtgtcacagtgggtcaaagagcttcaggaaaaatttttgattccggctgttgaacaaaagaaaagctatgtgtgggagcaatgcgatattgtcgtctcatcaatagacaccgcgaagcgctcgccccatcgagaaatcgttctgtctatcccatatgatcttgtcattattgatgaggcacacaaactgaaaaatagcaaaacgaagaactatgaatttgtccggaatctcgtaaaaaaatattgcctgcttcttaccgcgacgccaatccagaaccgtatcgaagagattttcaatttggtgtccttattaaaacccggccatttaggcagtcagaatcactttcaggaggagttcgccaagaagaaatccagtttagaagcgcatgaacatttaaaagatcttgtgaataaagtcatgatccgtaacaggcggcatgatacagggctgaattggaaacagcgccatgttgaaacagtgccgattcaattttctccatcagagcaggcgctttatgatgaaatttctcgcttgaaggaaagtatcaataaaccagccagcatgttctcgattatgaccttgcaaagagaatgctgttcgagcagagaagcggtgtatatgacgctgaaaaagatgctagatcaaaaagagaaacaagcacctgccattgatgaggatacgatttcagttttaatagatcgcatcaatcaagtgacacaaaactctaaagcgcttcaagtcgttgatttgatcaaaaaaatcgacgataaggtcatcatttttacagaataccgtgcaacccagatttatttgcagtggtttcttcagcaaaacggcatcagttctgtgccgtttagaggcggatttaaacgtgggaaaaaagactggatgaaggatcttttccgcgggaaaatccaagtccttattgcaactgaagcaggcggtgagggaattaacctgcaattttgcaatcatatgatcaactatgacctgccatggaacccgatgcgacttgagcaaagaatcggaagaattcacagactcgggcaggagcgtgacgtgcatatttataacatggcgacaaaacatacggtggaagagcatattctaaagcttttatatgaaaaaattcatttgtttgaaaaagtggtcggtgaacttgatgatattttaacgaaaattcaagtgaacaattttgaagagcatctgcatgacattttgtatcactcagcaacagaagaagaaatgaaaataaaaatggataacttaacctcatttttgtcttataaaaaacagcagcctgctgaaaaaagaggatcttagcctgtaaggaggttttattagtgagacagcaagaggttcacgattttctgctgcgtttttttcaagcaaacagctgccaaatcgtcgatcaaggcttaggctatatgacagtgcagcttacagttgaaatggacaaacaaatcatgaaccgccctttctactggcattggcgcgagaagacaggcggtgatccgaatccaatgaaaatcacttttattacagataaagaaaatgcgccaaaagacctagatggtgaatttatatattttggggccccgcgtctttttcaaatatttaaagctgttaaacaaaatgggagatttaccagaatgtatgagaaaattgaatcagccggagctaaagtcccacttcagccttggcttggtataaatgtcacgatttcataccagtccgacatgaaaaaggataagttattgtcactaggtcttcacctagtctctggaacgataattgaagattttcaaagcaagctgacccagttttcactgacgtctcaaatatgtgactattgcttcaccatttcacctatgatcaaaccagaaagcggacttaagcgtatggaaaactatatttccaaatccgctatgcaggagccatccgactgggcggaacaggcggttaacaggtggaagaatgatatgacattgcttgataagttttacgagcatatagaagaaaaaccagaagaataccatctagaaaaacaggcgctgaaaaccttgtatcaaccaaagatatcagttgaaattgaaaatggcggattgttttatctgcaaaataatatttcaagctaacttttttaccattcgacatcattctcgttttttttgagaaaatacgattataataaaggtatattggaaaaaaattctggtgatttaatggcaaatgacttccagagactaatgaagcatacaataagtcatggccggactggctgaaatacataaacaagtattttaggaggagaaactgcatgaagaatgcaaaacaagagcactttgaattggatcaagaatgggttgaattaatggtggaagccaaagaggcaaatatcagcccggaagaaatacgaaaatatttacttttaaacaaaaagtctgctcatcctggtccggcagccagaagtcataccgtaaatcctttctgaatgtgctataatatcacaaggaaggtgatgacattgattggccagcgtattaaacaataccgtaaagaaaaaggctactcactatcagaactagctgaaaaagctggggtagcgaagtcttatttaagctcaatagaacgaaatctacaaacgaacccctccattcaatttctcgaaaaagtctccgctgttctggacgtctcggttcatactttgctcgatgagaaacatgaaaccgaatacgatggtcaattagatagtgaatgggagaaattggttcgcgatgcgatgacatccggggtatcgaaaaaacaatttcgtgaatttttagattatcaaaaatggagaaaatcccaaaaagaggagtagtgcctgagcagaggcactaactcctcttttgtcaataaccatcgagacggcccagtatatgaatactgggccgtctctttttatggctgttattaatttttatcctcgctgtgcgctttttcattttctttcacataaccgtctttatcagtatggtcctttttgattgtcaagccgttccactgtgtagcttcgaacgagaattgaagcttaatggagttgccttgatatttattttgaaccataagcccgttttcatcttttgttttatcatctttgaattggatttccatttgaacctgatcgaagtcagttggtgtttttggaacaccatcatattcaggagcggttttaccgtcaattgttgctacattgactttaccgcttgcatttaagaatttagggtcaatttgttttttgattttttcagtagccgctgcatcatttttagcagacatcaaatacaagtctttaaggttcgcatcatctaaaataatgtttttcgggtaaccattgccgccctcttttccaactgtcaacaatgtcacttcaaactggctgaggaaatcttctggagatgtattgctgccgccgtttgctttaaaatctccataattaagcgccattaaaacttctttgatcgcaagtgatccgttattttcaaattggaaatcctttgtcaacttatctcccggctttagatttgataagttcacactcgctgaattctctttagcagataaatcaagcgtacctgatgcaaaagtagcatcctttgatttaatgtcgttaaatgctgcccatgttcctcctccaactaaagctaatcctagtgctgcagaagcaactcctaaactcaatttctttttcatacccatggtaaactccccttttattgaatgattttatatcgaaacctgttgccaggtttacaactgaagttaagtagacatggtgctgtcctttgtatctgtttccaaggcttttgtctttctttcaatttctctaatggcgctgctgatcgtcacaaaagcgtacactaacagcatcacgccgggaacaatcaataatacagccgttccaatcggctggctggcaaaatgaagcatatagcctgcatatggaagctgaaaacctgtgtattgtgcgcgaacattttcgtccgatacaggcgctgaatcagctgctgcattattatcaccttttgttttaaataacaaatggtctccttgctttgttatgtcaacaattctgtgggtgacagccgtatttgcatcctgcataaatgtaataacgtcacctttttgaagctctttcacatcagcgatttcttttaccaatattaaggaacctgtattgaactccggctccatcgaacctgacagaactgatttcagcgtatacccaaacaccgccggctctcccccggatgaacgtgttgaaatcacgacaagtgtcagcacaataataagagtaaagatgatcacgtataaaatattactgatcagcttcattgcttttttcatcctcttccccgctttccttctggtctgattgagtttcattttctttggttacagcttcttgagatgtttcttctttcattgttttttcctgtatatccttttgtgttgtttcattctcctttttgacgtccgactttgtttcttttttagggactgtcggtttttcatcgcattttgcaagcgtcataggctcggaccactcaaatgtactgccgtttgccgggtagcctgccggtttatatactttaaatgcataaatgccgggtttcatttttttcttcgtctcaattttataaagtgaatcgccgatttgattggagacaaatcctttttcgatcacgttcccatcctttaacggtttgcgggcattttcaagcttatgaagctcccacttccactttgatttcttaagtttctcacctgtattttcgagcacagcaaataaggcgaaaggtgagcatacagtgcctttcgtatccgtttgatctgatatgtgcaaatcactttgatcccagcgtttatcataatggcagtttttatctgtatgctgaaagtctttacacgtttgaagtgagacatcaaatgtttcaatatcatgaaaagcagcgcttgtatcatcggaaaattgtaagcatattgcggcagtcagactgaaaatgactgaaagctgaaagataagcagaactttcagtttcgtcttcgccttttgctgattgtgaaacaatcgaaacatatcttacctcctgtaaaacactgtaacttgatatgacaatcgttctctttaaagaactccacaaatagagtataatcaacgatttatagatttaaaaacaccgaaatcgctcatttcgttcgtttaaaagaatgttttcatcatattacaaagtcttgctcagtattgctcattttttcaattttttagaaatttttgggattgttatgtgagaatttaaatgcatatcccattattatttggtaataataaacaaagaaagggtgacagcatgatgatcaaacaatatgtgatttgtctatctcttctcgtctttggcaccacagccgctcacgcagaagaaacaccgcttgtaaccgcccgccacatgtccaaatgggaagagattgctgtaaaagaagcaaaaaaaaggtacccgctcgcacaggtactgttcaaacaaaaagtatgggaccgtaaaagaaaagatgaagcagtgaagcaataccatttaactctgagggaagggtcaaaagaattcggcgtttttgtaacgatttcatttgatccttatagccaaaaggtcaataaaattgccatattagaagaatatcaataaggtcctccattttttgaaggaccttattcatttatttgcggttattttttccgtttcagccaaagtcggaagccatagggtaaaataccgaaccactgctgggaagcaggcgtttttgtttctttccacacctcttttcgttcttttcgctcatctctcggagtatctatatatttgacaaattgctgcgtcatatatttaacataatcattcgttttcacgtgatcacctcatcattcaattattatgagtgttgtctcacatgactttttttataccctttacactgttttattctgtccatctcagcagctttttctgtttttggtcaaacacgatctgtgcagttctttctgttcccgactccgttgacactcttaagttgatttctttttgttcttttatcgatgtatcatgaatgtaataagaaacccgtccatatggaaattgctgcgtaccctcctggcctttccgttcctctagaacatgccgaatcgaaagaagcaccccattttgaagcaaattctctcctatgtataactcttttgtttccttctcaaacatgcagcgtgaaatatattgagcagcagcaaagttcacgattaacagcacaagcgctgacacaaaaagaacagctgggtaaataaaccctcttgtacaatacattcacccccctcctaaatacgaatagactggaaaagcagtttgatacactttttggtcctcactctcaattttcagcaaaacaacacaattttcaaaatcagctttcatggcagtaatatgatctaaaatcggaacatgccctttaccatccactctttttcttatcattgaatgataaatttcgaaacggatgtcctgcccggaaagattggtgcagattaacacgctcccatgctcggctgtcttaactgcctgtgactccttgcattcattcatcatctgttctatcgaaatcatccattcttgctgtgtgaaaccgtcatgttcctgctgtcgagacaaaaacagatggaaaatcgcagctaacgatcctgatatgagcaaaaagactgagagcgaaaataatacgttaagaagcgtatagccattctgtctgcaggatgctgaggcaatatgatttctctttataagctgtggctttgatacatacgttttgatattcgccctcctcctcccacttcattgcatagatatgattgttctttgtaattgtttttgacgcggctccttcaccactcatgacatatttgctaatgctctcattcatcatctgatagccgatttctcgtgattccgccattttttcatcagctatcagcttgtcccacaaggggacgactgtcagcagcacaaacagccacaggcttagcgcagacattgtttctattgtagaaaaacctttattttctctccacattgactctcccgctccctagataaactgttatatcatatacggcatggccatttactcgtatttttccgcctgcattcgggtgccctttctcattaaattccaaacggtcttttaatgtcagcagttctatagaaagtccccttgcatacggacgttcaatgaccgtatcaccaatgactaattgatattcttttttatgaaagaaaatttttgttctttgttgacgggaaatagcaacctgctgtgtgagcataatatcatttttcagctgccttgctgcctgtcggacagctgtattgtcataagcaggaggaagtgtagtgaagacggccaccaggaggatagaggcaaggcttaacacaagcaaactttctaaaagggtaaacccctcctcctcgtttaatttaatgttcaaccttaacttctccgccggtgatgataatgcgcttaccatttggacagacagcatcgtttttcacatagccctctgactgtaaatcggcaaggctcggagtttgtccttcatgatcaagctcaaatgcagtcatttgtgccttaaccatgttttgtaagccttcacagccctttttttgaatggtttggttatgtttcgtgacgttcggtatcgtaattaaaagcaaaatcgaaataataaagagcacgattaacatttcaacaagtgtaaatcctttctcattcattagcctcttcctttcacatttgattcatcatctgatacataggcacaagcatagataaatacacaagtaagatcatcgctgcaacaaatccataaatcattggctgaaggatgcctgtccatttttgcgctttgtgttccagccgctgtaatatgaattggctgtatgtgaaaagctcccgatccaatcggccgctcagctggccgtgagatatgacttttgataaatcagtttcataaaaagggcttccacaaatagcggattcaattgactcaccggcttttagccgttcaatcaattgttcagcctcgcagcggtagaaagggagaaacgtttgatgtttaaatgcattaaggctgtcataaattgagaggcctgattttaaaaggctgcttagctgcaaagaaaaaaagtagctgttaaacagcttgacaagctttccaaccaaaggaatcctgatacaaatcagcatttgccgggcaggtgattttttcttaaacacaagccaataataaatcccgatacctgctgtaaaaagaacaagcaaaatgatcacaagatcaatatgctgaaaaaaagcaaaaagtatatcggttgaacgtgaggtttccatattcatcgattgatagataccggaaaactgaggaatgatgatggactgtaacatataaaacatgacagcgaccgtaaagatgaggaaaagcggatagcgcagcactcttttcagctggtctgcctgtgcaatttttcgttccagcagctctccgctctggatcatggaagcaggcagttcaccatgtgtttcagcaaaataacaaatacctacggcttccttatgaaatgacaaactctttagtacttgataaaacggagccccttccctcaaacaagtgaccgaatcagtcaagtcagccgcctgcctcttattcatctgaagttccatcaggcgtaatccatccagaagcgtatatccgcccgcagtcatttcaccgagcctctttaataacctcgcttgatcctttaacgaccagacttttctaatctttttcatgataaacccaccggtcatagttgtttgtcgttaaatagccgagcgcaattccttttctgataatttgacgaagcgtttgatattggtaatttgcatgatttccttttgcctcctggatacattgctgaagatttttcccgtatagaagctcataaacgctagctctcctggtatttcgtgactgtcggcaatacactgatgaacatccgttttcacaaaacgggcaagccaaatcaaccaagcgctgagccgctattgcaatgacagtctgttcgatttcattcatattgataccgaattcaagcagtctgtaaattgcgccctttgcgtctctcgtatgaaggctcgttagtaccagatgtcccgtcatcgctgcccgcaccgcaatttcagctgtttccgcgtctctgatctcacctaaaataatcatatcggggtcatggcgcaaaattgctttcagacctgcggaataagttacaccggctttttcattcacctgaacctgaagaacatcttcgtcccttgtttcaacagggtcctctaatgtgacaatatttcgattaaagtgtttttttgcatattgaacgagagagtatagtgtggtagtcttccctgaaccagttggcccggtaaaaatgagcatgccatgggaatgttttaaaaacgagagtaatgtggctcctgtcttcggaaatagcgacaatttatcaatcgaagggatattgtattggggcatcactctgatcacgaggctttcttcattaattgtgggcagcgttgacattcttaaatgaacatttccctctttcagctttaacgtaagcgaaccgttttgcggctttcgcctttcacctatatccattgctgaaagaaatttaaaatgtgaaatcagccttacgcactcttcttttttcatgtccctttttttcagcaaggcatgatcgacccgaaaatgaatgatagcgtcccgctccctcggcacaatgtgaatatcagaagcctttgttagatatgcctcttcaatcaagtttttgcttaccttttctattgaatccaatttgattccctctcctttcaacgcatattgtagaaaaagaagaaagggtaatcaaacaaggaaaacgtgattttgtgagatgttatatgctgaaaaaccaattctttctggcaagaaaaaaaattttcaactgaatgtgccgctgtcattataattttccctataaataaaaaagcagacatggtcaccatgcctgcttgattccattttcattatgctgttttcgctttttgaccagtatctttttcaacggaaaggtcgcctaatgcaacaataccggtcatttggtcattttcaagaatcgataaactgcggatttgatgctctgccataagcgccttgacatcgtatccggtcaccctgatatgtctggtgaaaaagcggggcacgctgcacaaaatatgaaacatcctatagagtccgcctttttcgaggtttctttttcttcttccgctcctgcagcatatctcccgtccagccttttttcctcaaatagagatagatcaggactgtagatgtgacaatcaataagagagaaaagagatatccgtatttccaattcagttccggcatcactgaaaagttcatcccccataaggcacccagagctgtaatcggcgtaaaaagcgtcgtgaaaatggtcagtgcttttacaatttcattccccctgtgtgaggtaatgacttcctctgaatgcagcagattgttaagctccccttcaaattcgctgatgtatgtaaatcccctgtcaattttcagttgtgtccgctgataatcctttttcccttcattttgaggtaaaaaggtttctttcaacgccatttcaatttttttggcgcttaatattaaatttttccaaatcatcagttcatggcgcaggagatggacgcggtttagaatgcttttgctattgtcgtctttaatttgccatctgagctttctcagctttacttcaaattcatcaacaccgattaaatacgcattcattagttcgccgagaagaattaaaaacccctctatcgcattgtccgctctttccatttgccggacaacttctttgcctttaatctctctcaaaatcgaaaagtcaaaattgattgtgaaaaaatattgtctggtgatataaaagtgaaaaacagtatggtctttttcttcaccaagcccctgatcataaacaatcgacccaaataccgcttcattttccgtttcagttgtatctactcgcaaaaaattaacgtgatggttattttcaaaccacttttcacactgaggccagtgagaaaaatggattagatctcttgccttacttctttcttgaggccccatttggtaccaaaaccaatcctttcctgtatgtgccttcatgtcaagatcctccaaacttttgttctttattctttaattgcccaataaccgcgtcactaaaccagtctgccgcttcaacacatgttttatgagcattttcaggtggtatggaatgtagaaagacatcggaaaagggaggtgcatgccttccttggagaaggcagttgttttggaatttatcaatttactagcagtcgctattctcattttgttaacaggattttttgttgccgtagaattttcaatcgtaaaagtgcggcgatccaaaattgatcagcttgtcgcaaaaggaaagaaaggttctaaagcggcaaagcatgtcatcactcaccttgatgaatatttatcagcctgtcagctgggcatcacagtcgcagctttaggactgggatggcttggggaaccgactgtgcaaactctgcttcgaccgctttttcataaagcaggcttaaatgaatcgcttacccacctgctttcactcgtcatcgcatttttagtggttacgtatttaaatgtcgttattggggagctggctccaaagagtttcgccattcaaaaagcagaaagcattaccttgttgttcgctaaaccgcttatttggttttataagatcatgtttccattcatttggctgttgaaccactctgcccgattgattacaggagtgtttggactgaagccggcatcagagcacgagctggcatatacagaggaagaacttcgggtcctattggctgaaagctataaaagcggcgagattagaaaaagtgaattaaagtacatgaataatatcttcacctttgataaacgaatggcaaaggaaattatggtgccgcgaaatgaaatggttagtttatcactagatgaagactccatttcaaatcttcaggaaacagtcaagcaaacaaaatatacacggtacccagttgtaagagaggataaagataacgttattggcgtgattaatatgaaagaagtgctgttttccatgctgacgaaagatttttcaatcaagaagcatcaaattgaacctttcgtacagcccgttatccatgtcattgagacgattcctatttataaactactgctgaaaatgcaaaaggaacgcactcatatggcgatcctcatcgatgaatatggcgggacgtccggtttggtcactgtcgaagatattatcgaggaaattgtaggagaaatccgtgatgaatttgatgcggatgaagtgcctcatatccgcgaacttggaaaggatcattacttgttaaatgcaaaattattaatcagcgatgttaacagcctgcttggaactgatttatcagacgctgaagtagacaccttgggcggctggtttttgacacaaaacatagacgctgagcctgaaagtaccatagaatatgatggctactcttttaaggtaaaagacatcaacagccatcacattttatttatagaagtaaaaaaagctgaatagcccgtgaaaggctgttcagctgctatctttcaagataaacatggcaaaggcatcaacactcttttattttaaaccctttattggccagggctttagcaagactttgctcggttttcacattcgaaaaatccagacccagcttcacgacagtttgggcaatttccggcctgattcctgaaataatcgtctcaatgccgagcaatttggtgctgtcaatcactttaaaaatttgataggctaccatggtatcaacgataggaacgcccgaaatatctaaaaataaatacgagagctttaacgctgagcactgctccagcacagactccaaaatcgtcctcgctctgtgcgtatcaatttcaccgacaagcggaagaatcccaattccatcagtaatcggcataatcggcgcactcaattcattaatcatttctttttgcgcgtttaattgtatcatggtcacctggtgatattcttccgtaaacacttcgatgatctcatcaatgttttgattcaagatccggctccactcataaaattcctgaatgctgatgtcttgagaagaagcttcgctgaatttatgaatccattcaaacatgatgtgcctgaaagtgttaaactggccgacactttgtgtaaccgtcacttcatgaacggcacggtctctggcgcattgaagagaccaccggttgagctcatcctctacgtcttcttttctaagggattttgctacgatggtcaccaataattcatgctggtcttttaacttttgttctagtttttgctgatctttcgctgaatacagccagctgcctgttgatgtacaaactttcagccattgttgcgtgatatcttctttgtgctctgttaagtgctgatcaagagctatcatcttaatgagctacctcctgtttttgaaaaatgtacgctatatatgtataacgcgtctgcctttacacatactatgtttagattcaatgggctatagccaagcggtaaggcaatggactttgactccgtgatcgttggttcgaatccagctagcccagtttctgaacaggtgaaaaaccgaagacaagctgattcgaataaatcagcggatcttcggtttttcatcatgcagattgatgaaccgttttcttcttcgataacttcaacagttctcccgggttataaccaatcaccagctttttgttgtctactagaatcgggcgtcgcaaaagcttcggcttctcgattaaaagttccagcacctcatttaccgtcatttcttcaatgtttaaatttaaatttttgaaagtctggcttcttgtcgccaaaatttcatcaattccttctgtcgttaacgataaaatgtactttaattcttctcttgtcggggtttctctgaataagtgccgttcgttaaattcaatttgatgtgctttaagccaatgttttgtttttcggcatgacgtgcagcttggatatgagtaaaaagttaattgttgttccattcgttttttcctcctcagttaaccatctctttgtagaataactacccggatcatttttcatttaaaccatttacagaacttttttcggattatttttttaaaaacattcatacaatagaaaacacaatcaaagggacaaattccatttgtatattaataatgaaaatgtttacatttctaggtgtgatccattataataacagtcagagggactctcgggaggggataaaaatgaatcgcatgttccgggtgttaggattttggacgggaatttttgcagtcatgttttatttaggtgatatgaaagatgcttcccttttattttttggacagacgatcttatttgtgtttctatcgtatttgaacttaaccgaacgcatgtatatttatatttttggcgcttatttaacaattttcttcgccggctttacatattactcaatttttattatggtgcccggcggcggaggccattaaatgcagaaagagacaaaccttatcggtttgtctctttttttacaatgaaaacccatttaaaaacggattttggtcctgctcagtcagtacgtctgtttcaggtccatggccgcttaacaccagcgtgtgttccggaagtgtaagcagtttttcatgaatggacgtcagcagcgtctcttgattgccgcctattaaatccgtacgtcctataccgccttggaacaagacatctccggagataaccaagtctgcatctttcacgtagtaagacacactgcctggtgaatgtcccggcgtaaataatgtttccaaatgaaacggcccgatattcaactcaccgtcgccttcaattagatgatctgcaggcttagctgttacttctatccctcgcagcatgccggagccgtttaaagaagcgtccgtaagccaatttttttcattttgatgcaggtaaacagggatatcccatttttctctcacttcatcaagcgccccaatatggtcaaaatgggcatgtgtaagcaaaatggctaaaggcgtcagccctttttcttttatgtattgattgattttatgtccctcgccgcccggatcaaaaatcaggcattgatcatcattgatgagaaaatatgcgttcgcttgaatcggccctactggcattcgtctccatttcactattatcacctctttcttttttatgctcttattatgagggttttttaaaaaagattcaaacaatcgcaatgaaaacgctatcgacaaacctataaaaaacaggtagaataaaactggaaagaattgcaggtttttcaatgtaaagggggctgtgttatgttacttgtcgtgattttcggccttgtcgctcttttcgctttatggggagtcttgcgttctgttagaaataaaaatatactcgggtttttattagccggtgccaccttatttgtctttggatggtttaccgtgatgaccgtaataaacagcgggtatccaaccgcacattaaaacctgtatccgatcggatacaggtttatttttatggctgtaaatgtttattgacactttctattttgctctcaagcgtcgtttttttgtcacgcctgtcatcgatacggatattcgttgccactctgtgcaatcctttttgaaatggcgcttcgtgaattgcctgaatgactgcaaaaaggtcactgagttctccctcgatcagcgtattcatcggtgtcagctgatatttgattttcccttctgcttgatatccttctaatatcttttgcacatcggctacgtaagcactgacactgggtgtttccgtaccgattgggataatggttacatctgcgatagccatcgttattccatctccttttgatcaatgatgagttgcttcgtttcatgtgatttcaataaaataatttgctcaaaatgaaagccgtataacgcatatttcccgttcggagatatttgaatcggctccatttcccgcagagacacaagatcttttgtctctcccgatgctacattgattgctgcgagcttatatgcatcgccgctttgtttgaatgtataaaacaggcttcctgcttcatcatagtcatactccattggagccaaacttgtatatttcgcttggagcggccatttcgctgtaacaggtgatgttgattgcggcgttttaaactgatacgtcccttttcctccggaagctgatttgacagtaaaactcatttgatggaaagaatcgaagaatagaacgttatcctcaagcttctgttccgtcttagaagctgtatcgaacgtatataaaggccctgttttatcgtctcttccctcttttacataatcaaatgtatttttggatgtccaatgaatgaacggaacctgtactgggcttaagaaagattcgtcttttttagcattcacctgatatgtatggaaatcccagttttcattgaattccgtcaccatcatttgataaggatcatactgattccaagcagcttcaagctcatacgtttcgtaatctttttcgtaaagcgtctctccttctgcattaagcaaaaccactgccgtcttttggctatgtgtgatttgcagcagaatcatctgctccctcgcattgatttgaacatcaacgatttgaccatccgtttgatagagctttttcgctttgcctgtaaagatgcggtacgcaaaaagctctgttttcgtcggattagacgcagtatataatattgtgctgttattcagccagccttccaccccatccgctttttccgcggaaagcggtatgatgtcttttttctcatcttttgccgccgatgcctgtttttgctgctgatgagatggttcgcatgccgataaactaaacagcaataccgccagcagaataaaacaaactgatctcatcagcattcccctccgatcatctttattctctcatatttgcttcggcagaaaaaagaaaaagtttcagttactcatgaaaaaataacgccctccacaagataccgcttgtggcgttatatatgtgtgaaaactgctgaaacggcaaaggattttggccttttccaagttccaccgtatacccttccttaaaataatggtgaataaaccagtcacgaaatccagcatagctatctatatcccttactcccttataaatgttcccgcttaactcctcaaaatcctttatgacggcagcagattcctcaggctcaaggcctttatagccccaataaatttcttctccttgagtatgaagagccagcagtctgtcaggcggattctccgtgatcagccggtacatcgcaatagattccggctccgtaagcggagagattcccggaaaatcgcggtagctgggtgctgtcggttttcggtatttttcaatttcccataatgatggaaattgtttatttaaatcaaccccgtttatattcgccttccattcattaaaatttggacgatgttcatttagcctttcgagttcatctcttctggctcccatgacttctgatccgtttaaaacaagatcaacgccatccggattgacaagaggaacgagggataaggatgtgctgttaaacagctttatgggagaaaagccaaagaaaggcgaattgcagcataatgacatacagtattccttaaaccattttagcaggacagacgttgtaatccactcattcgcatgaaatgacgcgttcatatggaccttttttacggcatgctccccaccagccttcagctcccagataggcctgccgagtacagaacggccaatttcccggcatgagacaaacggaaaaacatcaataatcttctttatttccttttcaacagctgaatcatcatagattttctcttgctcaatccagctatctgaaagtttcagctgccgaggctgtaaaaagcgctttatgtcctgaatggtttgaagctctttgccgctatgctcctctatcacataaccagggcaatacaattgatgtttttgtgcggagcgatttgcacttttaagcaattcctcgtctatcttcagttctttcgccacattggccaaattgttcttgatctcaggtttcacagtaataaacgccatcatcatcccccttttttgttactatatgacagcgtatttaaaaaaagaaagcctcccgctcacttcaatgcgggagacattgtgattatgatgcctgatcaagcatttgtttttctttccgctttgacgaattgtccagccttttctggtcataaaatcgcaacaaatccccataaatgatttcatcagaaagtgatagctcctgttttgctttatcagcaaatgcttcacattgttttgtctcttctaacggttttcccgtctctttgtcataacacgcaccgtctgtataaacaacctgatctgtgataaagctcccgtcccggagcaccgtgaagtccagtttttcgtctgaaagcagatcgttgccgaattgaatttgatctttcgtatcaatccctaaaagattcatcagcgtcggcctgatatcaatctgcccgcctactgtttcaatggtttgcggctttttatcagtaatacccggaatatgaatgaccagcggcactttttggagctgtacctcttcaaatggggttatttcttttcctaaaaactgccccatcgcttcattatggttttctgatataccataatggtcaccatataatacaataacagagttgtcgtataacccgtcttccttcagcttttcgataaaccgtttcagcgcctcatcctgataacgcactgtcggaaaatatttatttagcgtctggctgcttgaatcatattcatcaatcaattggtcctcttcatcaagatcaaacgggaagtggttcgtcagtgtaatcagcctcgagtaaaacggctgaggcagatttttcatcagctctgaagactgctcaaaaaattctttatccttaagtccccagccgactgaattttcgtcagttacatcatacgagttaatatcaaaaaacgaatcatatccaaatgagtcgtacattaaatcacgattccaaaagctcttattattagcgtggagcaccgctgaatagtatccgctgtttttcaaaatttcaggagcggccatatattgattgcccgcattcgtaaaaaatacggcacctcgtccaagcggatacagtgaattgtccacgataaattcagaatccgaggttttcccctggcctgtttggtggtaaacattattaaagttgtagctctgttttataaagtcattcagaaaaggcgtgatttcttctccattcaatttttcattaatcacgaagctttgcgtcgactctaaggatacgagaatgacgttccttccttttgcagcgccgaataagcgtttgttggcatccttcacattagcggttacgtagttttcaatctccgtcaggctgttgctgtctgccaacgctctctgtgcggattgctttgactgaagaacgccatcgtaaatatgaaaattaaacaggctaatgtttttaacaagcatttctctgtcaaatgagcgtgtcaatagctgaggtctttccgcctcagacaagcccaggttgaagaaataaacagaagcaacgaacaaaaaataagccgcccgttcatttttcgttgagggaatgtccgattgaaaagctttttgccggatgtgaagccatattaaaaccgcaatatctacagctaataggaggtctgtcggctcaagaagtgttccgatgctgcttccgagatcacccatattgctcgtttgaaaaagaacagggattgttaagaaatcattgtaaaaacggtaaaaaaccatatttgccagcaatacaaacgtgacaagacagctcatcgcgataatgtagcgatttctgtttttgccttttaaaaacaggctgaggccaaaaataagcaacaaaaaactcaatgggttgataaacagaataaattcctgtgttagattgtcgattttaatatgaaaactggttttgtaaacagcatacgttttcagccacatcaataaaatggcaatcagcataaatgaaatcttcgaaaaaaacgtttttcgcatttcaacctcctatgcagcacgctcaaaaaaatcagtctattcccaacattctcattaacacatcaaattaaatcttaacctgagcacaacaaaaaatcaatttcatttacacaattttaacaattttgatgtttcagccattcatttttagcgatccaagcgcctccgataacgccggcatcatttccaagtgctgcgattgaaatatcagcagcttgggctgcccgcggaaacgcgcatttgcggaatgttttctcgacttttgatctcagcagttctccggctctcgatacgccgccgccaagaacgattttggatggattaagcgagcttgccaaatttccgagcaccaaaccaagatgcttggctacataatcaaccacctcaagggcaatttcatcattttcacccgccgcttcaaacacatcccgcgctgacaattgttcggttgcttttaaacgtgtcgtctttttagcatttgctattttttcttttgcaattcttacaattccggttgctgacgcaattgtttcgatacagcccgttttgccgcagttgcagggcgctccgccttcagggatgctgcaaatatggccgatttctccgccggcgccatttataccatgtacaatttcaccatttgcaatgatgccgccgccaactcctgtgccaagcgtcacgagaatgacgtcttttgcgccatcacccgctcccttccacatttccccgagcgcagcaatattcgcgtcattttctataacagctgggatgccggtttctgtctccagatggtttttcaaagcataatttttccaccctagatttactgtttcataaaccactcctgccgccatatctacagggcctggtgcacccattccgatgtatttgatgatgtgcttcggtttttgcagctcatccagcttgctgtcgattgtttttgcaattgtgacagtaatcgtgtcgccggttttatcagtcggaacttcccacttatgctgaatttcgccatattgattaataaaagcgagtttaatcgtcgttcctcccaggtcaatgcccgcaaaccatatctcgtccatttttatcaccttagcctttataaaaatctcttccgttttttgtttgttccaattcttttcgaaggacagctgccgctctggcccactgctccttttcaatcatgtggttcatgtataattcctttaattcatccagcataaactcaatttcaagctctctgtctccaaaataaacaatgtggccaaacgtttttaacagctgctgcacatcataaaatgtattcattttcctcaccatttcttgaacttaactatcataagcgtattcataaggaagcggtcagtcaagaagaaaacgctgacaaaaaagccagcttcctttccatattccacctctatgattctttattgttttcaatttgccgctgcagctccttgtagcgctgctccttcggcttcagtttcacagccgtctggatggccttttctgcttgtgcaagctcatttttttccgcatacaataacgctaaattgtaataggaagcatggtctttaggttcttttttcactgctcgttccaaaagggaaaccgcctgatcatattcgccgatttgaatatcagaaacagcaagaattttcaaaagatcggcagaggcatctttttgcgctgcttctccgttcagcaattctgttacttcttcatactttccttcctgatacagctcgcttgcctgctgaatcagcgctgactcctggtgtgaaggcgaatgcaatccgtaatataaaaatccaacagccaaagcaatcagcaaaaccgctgacaacaatctttttccaaaggctccggctttaggcaaccccagtgctgctgcagcgaaaaagccgccaatcaagccgccgatatgtcctgaattatcaatattcgaaaccgcaaaaccaaagcccagattgatgataataatgacaataatattggttcctatagttcttaaaaacatttttcgattagacaaagcaacatacagtaatgcacctaagcatccgaatatggctcctgatgcccctgccgaaggatacgggctgaacacaaaactcgcaatcgaacccgtaatgccagcagccagataaatcagcaaaaatctccccgatccatacatccgctcaaccgctgtaccaaccgaccataaagccagcgtattaaaagctaaatgcgctatgccgatgtgaagcacgatcggtgtcagaagccgccaccattctccttgtgcaatcaggctgttttcttttgctccaaaagccaccagtgtctccgtattagtgctgcctccgtttatttcgagcaagaaaaacatcaggatctgaagcgcaataaataaatatgtaaaagtcggttttccgttttgaaaaaccgccgcttcagtttttctctgttcttcttgtttcagcactagcgaaaggaagcgttctcgcgccatttgcgcgttttcaaacgaagcgtgttcctctgaacaatcttctgtacgaaatgatggaaaaaccgcttgaagatcatctcgaagcatcgttcctctaacgatcgccggctcaactgacacagttcccttctcaaaagttttttttgcaatctcttcccagtcatcaacaggggcttccgttgaaaaaaacacattcagcagcttcatccttcgtctgcccaattgatgtctgactcgttctactcgttcggcctgctcttcgatgtctctaaccatttcttgacggaaatcaagatcgtgcttataaagacgaactagatcatgagaggacttgtccggcgcttccagccatatttcatctgactcaccggcttgtatgacgccatacccgctattcaccaggtgcgccgcaattttccaatatgtatactccagcaaaaacatgtttaccgctccaatagtttttttttcattataacagctggcgctccgaaacgcctactgaaagcaaaaaatcccgtttttcacgggattttagaaagcttgctgtataaacttattgcggataaatggaattcttaaaaacaaatggataaaagaccgcctgattcctggctggctgagtacagtattcataagacggtagcgattttgataaaacatgacggcagaaaccgcgaaaatggcatatatcaaaagttttttcatgatatccctcctgccaatagggtttgttattctgccttatttattctcgaataagggacaggaaagttatgaaaaacaagaaataatccgatcctctgttatcagcttatgtaccgggatgtcatgcggcaaacggggtacgtgcgcaaacagctggcactccaaaagcaaagagactgtctccccttcatattcacttaaatagcgatcataatagccgcctccaaagccgaccctaaacccgttaacatcaaaacaaacacctggaacgatcaccaagtcaatttgtgatgggtttacttcttttgttttttcaattaccggctcgagcagtccggcgtaaacggtttcgagctgatcatcggtcttatatgtccgaaattgcattttcttcgtgtccggatggcattttgggatgcaaacttgtttcccttcttcccaagcctgctcaatgacaggacgcgtcggtatctctaatcctctggagatggtgaccgcaatggtgccggcattttgccactccggcagagaaaacaagtacttatacatacgttccgttttttgaagcagatcttcatttgataaagcagacagtgcctccagcgtcttttttcttaattgtgatttcatctctcatccccctcggaatagaaaaaaagccagaacctttttcaaagctctggcttttttcttacacctcaaacagcaaagctgttattttgtttcacggtgtaacgtagattttttatcacgtgggcaatattttttaaattcaacgcggtctggattgttgcgtttgttctttttagaaatatagttacgctcaccacattcagtgcaagccaaagtaatattaacgcgcattattttccctccaaactaaaatcatttacttattcagacttatatataataccactataatggacggaatgctaggctgtttttcaatgaattgctgaattattgaagatacgctcataaagctgcaaatatgatgacataatgagtcgggggtggtggagcttgaacacttgttgtctgccagcttcttttatccggcgggctttttcccggtcttttaaaaagctgtccagcagatcagccgcttcctgtacgagcgtaaaattagcgatgattgccgttttgtcatgaacggcataatcacaaaaaccacccgactgagaaacgacagtcagcacaccttgttccatgctttcttgcgcggcaagcccaaacggttcataagaactagggaaaacagccatttcacattgagacagtaacgttctgatgtctttcctattgagaaacggcaggaacatgacgcgatccttcaggttatatgccgcagctaatttctcatagcaggacagagacggcccctccccagccagcactagatagaggtctggctgacgctgcttcaagatggcaaacacctttaacagctgcgaaaatcctttttccggaacgaaccttccatatgaaaagagaaatcttctatttatgcttctttggattttccccttctcttcctccatagatgcagggcttgggataacggttatttttttatgtgctgccttattaagagaccgcttcataaatgtgcttaatacgatcaatgcatcagcggattctataaggagccgttcggtcttgagcctgtatgggtgtggggcttctcggcacaccttcttcctttctctttcaagaccgtggattgtcgcagtaagcggaaggccaagccgttgtttcaaatactgggcagcaggggcagttgtgtcatcatgggcatgaatcagatcaaagcgtttattgtgtgataacacatggcgaaccattgtaaagttagcatcagctatgtaatcttcaaacttcgcatacgaaaacagctgcccgctcggagtaaaaaccgtaatgttgatatgagggtttaaataggaaatgaggcggtttaaatggacacctagcccgcttttcggctcatcgggatgttcgggtgaaagcatgagaatgttcaccgttctctctcccctctcccataacaggtgtatgcagaaaattgctcctcccacctggtgtgcgcttcctcaatctgaaagctgtttatatgacgaatcccattttcatcaagatagatgtcgtctgtatcggcaagcttgagagagacattcattgaattcacaatactgtattcagcccgatatacagcatcaccagccgtctgtctaatcgtccattcgcctttatcatacgttgtgcgttttgtcctgacagcttcaatgtcttttcttttgatgacaatccgcaattcttttatcatatcctgcgttttttcgaaaaggacagcttcagccagccgcattgtttcttctgagatttcccagcttacggtcaaggtgtgagcgttttgaatgattatgtcgaatgtgtccctaaaaaaggaaagcttatgtcgtatattatagggaaatgggtgtttatccatggactcttaacattctcctttccaatcgttcacttcgtgttcctattaaaccattacataaagaagaagcaaagaaagatttctcgacaaaatctcgtttttttcgcgaattcctttagaaactattggttttatggtataaaaaagaaggataaaaaaagaatagaaggtgatgaaacgtggaaattgctattattgcgttgtttatcgtcagtatagcgctaattgcattctcatattctcaaagagacccgatgaaagatgtagaacaggagctcgaaacactgcagctttctgcgatgcaggaaatttacaagctcaaaaagaaaatgacagtgcttgaggaagaattactggaaacaaaccttgtcattcgcaaatcaaagcagaacgacatcaatcaaaaaatcgctaaacaaatactttctaaatataataacggtatgtcagctgaagcgattgctaaagctgagcatgtatcagtggaagacgtgaatacgattatcaaagataatgagaaggtgctcgtatgacaaaacggggcattcaggcatttgctggcggcatcattttagcgacagccgttcttgcagctgttttttatctgactgacgaagatcaggccgctgctgtaaaagataataaaacagtaactgaacaagacgtgaacaattaccttgattctaaaaaaatggtttctgtgaaccgtgatgaatatcaaaaacttcttgattcaaaagagaaatcgttgaccgatgacagcagctcagacacgaaaacagacaaagtcaaaacgtacaagctcaaaattaaagatggcatgagcactgcggatgtatctgctattcttgaaaaagagggcattatctcttcggctcaagactttaatgactatgtcattgatgccggctatcacaaagaaattcgtgccggcgagtttaaagtaaaatcagacatgagtttcaaaaagatcgtaaaaacgttaacacgataaaaaaacaggctgactcagcctgttttttttcatccaaactttcctgaaatgtaatcgagagttctttggtccttcgggttagagaacattttattcgtattgtcgcattcaacaagctcgcccatgtagaaaaaggcggtttgatcagaaacccttgctgcctgctgcatgttatgcgtgacaatgacaattgtgtatttatttttcagctctagaatgagttcttcaatttttctcgttgagattggatctagtgcagatgtcggttcatccatcagcaaaatatcaggattggtcgcaagtgctctggcgatgcaaagacgctgctgctggccccctgacagcgaaagagcggacgtatgcaatcgatccttcacctcatcccataacgccacgtcttttaatgacttttccacaatttcctgaagcttcttcttatttttggtgccgtggactctcggtccgtaagccacattatcaaaaatagattgcggaaacggattccctttttggaataccattccgatattttttcgcaaatccacgatgtccactttatcctttaaaatgttgctgccattatagttcagctcacctgcaagctttacattcggcgtcatttgaatcattaaattcaatgtcttgataaaggtcgatttcccgcatccggatggcccgataatcgccgtaacctcattttcataaatgctcaaattgatattttttaaagcatgatgctgtccataccataagttcattccattgacttgatagacttcctgtttcattacagcttcggtagcaatactcattgccgccctcctatccgaatttcccgttaatataatcctctgtcttttgctttttcggactcgtgaaaatctgttcggtctgtccgtattctacaagctcgccgtttaaaaagaatgccgtccggtcagaaacccgcagagcctgctgcatattgtgcgtgacaataataattgagtattctcttttcaatcctgtaattaattcctctattttcgcatttgaaatcggatcaagcgctgaagctggttcatcaagcagaagaacagccggcttcatcgcaagcgttctcgcgatgcataaacgctgctgctggccgccggataacgagagtgcggatgaatgtaaacgatccttcacctcatcccagagggccgcttttgttaaactttcttccacaatttcatctaaaacagctttattccgctctccggcatatttcaatgcatgtgtgatattcgcatagatcgatttcggaaatggatttggtttttgaaaaaccattccgatttctcttctcaagctgacaacgttaatattgccgcccaatatatttaatccttcataaaggatttcaccttccgctcttgcagatggaattaaatcgttcattcggttaatatttctcaaaaaagtagattttccgcatcccgacggcccaattaaagcagtcaccgcatttttttcaatatccatgtttacatgatgaacggcttgtttatttccgtaaaaaatggacagatctttgacctcaagcacgtggttctgcttcggaacaataacagctcgctcaggtttttcttttaccatttgttcagacatgcttttcgcctctttccgttctaatttgccgtaagctttttgtagatcatcgtgccaagccatctcgccgcgagattaaacacaagaacagaaatcaccagcacggcagaaccaccgttggcaatcgcttcagcatccggaatcattccttgtgtattgacgttccaaatgtggaccgcaagtgtttcagcgggcctgaaaatattaagcggtgatgtttccgaaaacgggttccactccgtaaaattaagacgcggtgttgtcaggcctgccgtaaataataatgcggccgcttccccgaacacccttcctgacgctaaaattgctcctgtgataatagaaggaatcgcacttggaattaaaaccgtttttacggtatgccagcgtgatacacctaaagcgagagaggcttccttcagatctttagggactgaacgtatcgcgtcttctgtcacacgcaccatgacaggaaggttaaaaacagttaacgcaagcgctccgcctatgatcgtatatccccagcctgttaagttgacaaacatcaataatccaaacattccaatgacaatagacggaagagatgaaagcacctctatacatgttctgatgaagtcagttactttgttattaggcgcgtattcagccatgaagaccccgccgcccacaccgagcgggattgtaatcagcattgtaataaacaaaatataaaaggagttaaacagctgatctcgtatgcctcctccagctgcaatggcgctcgactttgttgtaataaattgaaaactgagctgagaaacaccgtttataataatataggaaaacaaacctactaaaatggcagcgataatggctgcacacaaaccaaacattccggtcgccagtttatctgttattttgcggttcattacactttcctcctagatgacaagtagcgaataagcaggatgaacaagaatgacatcaccagaagcacaagccccattgaccacagcgtattgttttcaacacttccgtatgtggtgtggcccatattcagcgtgatgatcgttgtcagcgttcccgcagtgtcaaacaggctttccggcaatactcttgtatttccaatgaccatctgaacagccaaagcttcaccgaacgcccgagccatgcctaacacaacagctgtcatcaatgttggaaaagctgcaggcacaagtacttttctgatcgtctgccatcttgtggccccaagcgcgtaagaaccctctcgtaaactcttcggaagagaagccattgcatcagcagaaatcgatgtgatcgtcggcagaatcatgacggaaaggacaatcgttcccgccaataaactgtgccctgttccgctcgatttgaactgggcgataaacggcaccaatactgtaagacctatgaatccataaacaacagatggaataccgactaaaagctcaatcaccggctgcagcactttctttccccaattcggggcaatctctgtcatgaaaatcgcacctgcaatgccaagcggcgcagcgattagagcagaaagaatcgttactgcaaatgagccaaaaataaatggcagcactccgtatttcggatcagtatctgtaggattccaatttaagctcgttaagaattcaattgggcttacaccatttacaagaaaagattgcagccccttcacgccgaggaaaatggtgatcgcaacagatgccgcaatcataatcagggcacatgctgtcacaatcattcttccccgaacttcatccaattgccgattttgccttgagctgattaaacgctcgctcacagacatattttctctattgtttatcattgttttacactcctatgaatgtgttaagaggagaaacggttgtccccgcactcctctttttattaagatcagctttgcttccctttggcatcgcgtgtcactttcatatcagtaaccggaatgtagccttggtcagtaacaatgcttttttgaatgtcttcactctttagataatcaagaaattctttagctaaacctgtcgcttcaccttttgtataagaatgctgataagcccagatcggatactcgccagttgctacatttttcgcttcaggtttaacaccgtcaatagatagagcagttactttgtcatctgttaaatatgagaatgcaagatatccaatcgctcccggagtatcagcaatgatctttttcaccgtgttggaggaatcttcagtaatgccttctgcaggctccgctccgtcaagcgcatatttcacaaatgtagcacgtgtgccggaagaatcagggcggtttacaagtgtaatcttttggtctttgccgccgagctctttccagtttttgattttgccagtgaagatttttttcaattcatcttttgaaatatccttcacaccagcatcagggtttacagctgctgccataccaactacagcgacttgatgatcgacaagcgcttttgcatcgataccttctttttcttcagcaaaaacgtctgaattcccgatctgaacagctccttcagagacttgagaaagccctgttccagaaccgccagcttgtacctgtatatcagcatcagggttttcttccataaatttttccgcggctgcaagtactagtggctgcattgccgatgaaccagaaatggttaaagaacctgatgccttttcttctccttttgcagaatcgctattcgattttttactttctcctgcatttccgcatgcagctgcaatcatcataaaagcagccatcagaagcataagcaccaatttgttttttttcatttcctgaattccccctgcgtataatgtgtaatttgtcctacacgtatagagtaaaggttctatgtaaaaagggtttgaaccgaatgttaaggttttgtaaatcagtgcgtttttttgtataaaaaaaacgcccacatcatgtgagcgtttctttttagttatcagaagacgttgtgttttctgcattttcttcgattttgtttttattcttttgctgagtatcttctttgtcctgcttcgatttcagctcaaaatatttatccattacttccctgccgatttcgtttgtaatggtatatttagcgctgtaatcaatataagcccaagggactactacagagatcgcaatctcaggattatcagccggtgcataggcaacaagtgtcgtattataagtcgatgttcctgtttttgatttatcaggtccatcatagaacgattgtgctgttcctgttttaccggcaggctgatatgacgctgaagcaaattgactggcagctgtcccttttgtcatcacccgtctgaatccggcctgaacctctttaatatattcactcttcatgtcgattttattcagcacttccggctgaacggattgtacgacagcaccgatccctcttttagcatcaggttctctgacttcctttacaagctgaggctttaagcgatatccgccgtttgcaatcgttgatacgtattgcgcgagttccagcggtgtatacgtgtcgtattggccgatcgcatagtcaagcaagaatcccgtcaatctgtctgttcctttatagcctgtcatttcattcggaagatcaattccagttttgacacccagtccaaattggctgaagtaattacggaacgtatcaaaggccgtcgtatcaatcggtaaagcctggtgcggtttatattcaccttttccgagcgcgatcgcagttttaaacataaatacgttggaagactgctctaaggctctttgaatattgaccggtcctaagttagtccatgactttttaccgcgtttatcctgactgccgatatacaatggttcatcctgaaaaactgtattcagattgatagctccggtttgaaggcctgtcaagactgttgcgcctttgactgctgaacccatagcgtaagatgacgtcattgtacctaaagcgtaatcatcaattttatatttcccattttcttgtttaatctgcttgcccgccattgaaagcacttcaccgtttcttgggtccatcatgacaacgaatgcccggtctaacaattgcgtgcttggtcttgctttagcagatttgaggttcttctcaatgattttttccacttctttttgcaaatcaatgtcaatcgtaagcacgagatccttaccggctttgccttcagataccgtttttgttcccgtgacattgccgtttgaatctgtgatattttcgactttggctttttgtccctgcagaaggctttcatattggtattccaaatagctttttccgaccctgtcattacggctgtagccaagcgacagataatggtcgagcaagttggacggcaatccttcattagagctggaaacacttccgagcactgagcgaagaaggtttttatacggatattcacgttcccaatcggacgtgacatcaacacctggcagttcgtctaaatgttcacttaccactgccatttccttcgctgatacatcttcgtttttgatatattgaggggtcaatgcatagcccgaatccatctgtcttttgatagcgaggatctgcatatctttatccgtcaattcattcaactgcttatcagtaatccgttttagctgaagctggtataaatcgtcatcggatatttttttgtcttcaacctgctgtctttctttagagctaatgagctttttcgcttctttcggtctagtcaaaatccaataatcttttttatcccgttctgttactttttttgtatcgactttgatcatgtcagacagcttttttgcgatctttaagcgctgttcttgcgtggtcgatttagatctcgtgtatgtgattgcatttaaagccttatttgtcacaatggcattaaagtttcgatcataaattttcccgcgcggtaccgctgagctgacttcactttgttcttgcttattcgcttggtttttgtaatcatcaccttgcacgatctgcttgatgcccagttccacaataatccaggtaaatataacaaaggcagctaaaaataaaatattcagccggatcggaagcgacttctttttctctttatgattttgcttttttggtttatttctcctcataacatcaccttttctatttacagaaagaaaagacactcaagtaagagtgccagttttcattttaaaggttttttcgacttttttctacagataacccctttttggcaaaaaaattatctctcgccttttaacagggtcggttctgttacccgtttttggccgtcttcttccatggtttcattttccccttctttctccttaaaacggatatccttgacaaagtaataaatcaaaggatgtcctatacccaatatcgcaagtgacaaaggaattcccacatcctctttcagaagggccacaatcaggagaaagcacaaaatggaaacaattctgccggcgttcaagaacatttctctaagcacgatatattcaattcttgcttttctggcatgcctcgcgcgccctatcacatcatatgtaagtgatacatatggcacaagcaacagaggatagccgatggcaataaaaacgccatacgttaataatgtcgaaaagctcatatggaacagaatcaaaaacagcgcgccatacaaaataagtccgcccagcaaaatcgatttttttctcgcctttttcttaatcagcctggatgcaaagtagtaggcaaagaaggaaacagctgaattgacaagaccgaatgtaccgagagcaagttcgctgtttgtctcaataaatacaaacacactgattaaaaagacaaaaatcccttctctcaaaccctgaaaaaaatgcgcattcgtgattctccgccaattcatattgctatggcgctctccaaatactttgctcagcataaaacggccctttgattctctccgttttaagaaaaagctcatcacgacagccagggcaaataaactgagggagagactgaaaatcactgtataacccgtattattttcaagccttgagatcacgaatccggctacaatcgggccgatcattcctgcagaggaagacagaatgcccataaacccgttgaaaaagtctcgtgtatccggctctgttatttcaaaggtcagtacgttaaacgctagccaataaaagccatagccaactccgagcaccgcgccgattagcacgaggcggctggccgccgtttctccggctaaaagcacacttaaataaaaggcagctaaaaaaatgacgccgaaccttaaaatgaataccctgtctatttttttggctaaccgtccagccaaataaaaggttatcggctgcattgtcacaatggataaattatatatcgccaaatcaataaatttccctgactgcttccaaagatacacattaacaaatgtattggacagtgcaattcccagcgagtaaagcccgccaatggtcagcagaaagagtaaccctttgtttacgtctacatcgcctatcactttttttagtttgctcattactgactcccctttactatcccttagtctgtctcactcaaaccgagatatgtaaaaagaagacataaaaaaacaaggtcccataatgaggaccttgtttgtgccattattttgcttcgctgtatagacgagccacttcgtcccagtttacaacattccagaaagctgaaatgtaatcaggacggcggttttgatagttaaggtagtaagcatgctcccaaacgtcaagacctaagataggcgttttgccttctgaaagcggagaatcttggtttggcgtgcttgtgatttcaagtttaccgttgttcacaacaagccatgcccagccagaaccgaagcgtccagctgctgctgctgcgaattgctctttgaatttgtcaaagcttccaaatacactgttaatctcttcagcaagcgcgccagtcggttcgcctccgccgtttggagataaaagtgtccagaataatttgtggttcgcgtgtccgccgccgttgttgcggactgcagtgcggatgttttcaggaacagaatcaagatctgcaacaagctcttcaactgatttgttggcaagagcagtgtttccttcaaccgctttgtttaaatttgtcacgtatgtgttgtggtgtttcgtatggtgaatagtcatagtttccttgtcgatatgcggttctaaagcatcgtacgcataaggtaattctggaagttcgtaagccatgataattcctccttagtatatatgtactgaaatgccgcttcacagcgagcctttcttcattcaatgtaacaaaagaatgctttgtaatcaatgaaaaagctcacgatttggctcatttcagcggacatatttcactttaaccgataatctgccccattaaacctgccgccagcatttcttataggaccgtccataaaaagtatccgatcatcaaaagctgtatgatgccctttgcaataacccctgttaaaaaaccaatgagtgagccgaggccaattttaaacgctgactttaagtccttctgatgaacgataagttctgcgcaaacagccccgataaacggccccaatatgatccctgcaaccggaatgacaaaaggcccgattaataaaccgatcgtgcttccccatatggcagctttgcttcctccgaacctttttactccaagcagattcgacacgtaatctgctgcgaataatactgcggcaaaaactgcctcaacaagccagaacatataagaatacggactgaatgaaaataaaaatccgtacaatacaaatccggcaacaataaatactacgctcggaataacaggatacaccagcccgataaaggcaatgataaaaaccgctgcaatcaacagccaatacaacatatccatagcttccatcctcccattttactctgtcttcttcatgtcttccttgtattcacacgcatgcaacgatacaataagcaacatatattagtttagctaggaagtgaagatagtgaatgtgtttcagcttttcattaaaagtacatactctccccgtgatattgcaaaaacaagatttcaaggaatcggaaaagcgattctttatgtatttttgctctctgtcctgtttgcaatccctaccgcttattatgtaagtacagggaccgtaaaatcaatgaacggctttaaaactgttttaaacaaagatttccctgatttcacaatttcaaacggcaaacttcaaacggatgagaaaaaagccacggaatctcaagcaaatggtttcgttatcgtgttcgatccgacagactcctatggcactgaacaaattgaagcaaagcaaaacgcgatcggcatccttcagaacaaatttgttttggccattgacggacaagcccaagaaatgtcttactcaatgatgccatcagagttacagaaaaaagatgtcattgcagggttaaaccaaaataaagcgatgattgtaactgttctctcagctcttatttttctcgtaacagcagcgggaaaatttattgaagtatcgtttttagcgcttatcgggttaatcattaagaattcgcagaaaaaacatttatcctatcatcagctctggaagctttctgcttattccatcaccctttcaactgtattctttacaatcatgcgggcattagaagcaaccgtaccaagtgaatttttgctgaactggtttgtcaattttgtcatcctgtttctcgttttaaaagagattccgtccaaaaaagctgctgtataaaccgaggctgcattcgcagtctcttttcttttgtcatgaatcgaaatggacaagcatactatggtataaaatttcgtatgcgggaggaaaagcgatgaagcgtctcaccttagtatgcagcattgtttttatactttttattcttttttatgaccttaaaattggaaccatacccattcaggacctccctgtctatgaagcatcagcaaaaacggctgtacaagaaccggcttataaaacggtgaaggtaaagccgggtgatacggttatgtcgatagtcggatcagcaggttctccggatgacattgtaaaggattttgaagcactgaatccaaaagtgaaagctaacgccattcaagcgggaacagcgtataaattcccggtctatccttaatttaacgttaatttcttgtcagttcggcgaagacactgttacaatgtaatttgtaaaataaattcacataaaccatactagaattgttatatctagaagcggcaactacaattaaggagcgattgcaagtgagtgaaatcacacatcgtacaaaaacgcgtcccgtcaaagtgggacctttaacaataggcggcaacaatgaagttgtcatccaaagcatgacaacaacgaaaacacatgatgtagaagcaacggttgcggaaattaaccgtttggctgaagccggatgccaaatcgttcgggtagcatgtccggatgaacgggcagcaaacgccattgcggatattaaaaagcgcatttccattcctctcgttgttgacatacatttcgattataaacttgcgttgaaagccattgaaggcggcgcagataaaatccgaatcaaccccggcaacatcggccggcgcgaaaaagttgaagcggttgttaaagctgccaaagacaaaggcattccgatcagaatcggagtaaacgccggttcattggaaaaacgcattttagaaaaatacggttatccgactgccgatggaatggtagaaagcgcacttcatcacattaaaattcttgaggatcttgattttcacgatattattgtcagcatgaaggcctctgacgtgaaccttgcaatcgaggcttatgaaaaagcggcgaaagcgtttgactacccgcttcacctcgggatcaccgagtcaggaacgctgtttgccggcacagtaaagagcgcagcaggactcggcgccattttaagcaaaggcattgggaacaccatgcgcatttcactaagcgcagatcctgtagaagaggtaaaagtagcaagggagcttctgaaatctttcggcttagcctccaatgctgccacgctcatctcatgtccgacttgcggccgtattgagattgatctaatcagcattgccaatgaagtggaagagtatatttctaagataaaagcgccgattaaagttgctgttctcggctgcgctgtaaacggacctggtgaagcgagagaagctgatatcggaatcgccggcgcacgcggtgaaggactgctgttccggaaagggaaaattgtccgtaaggttccagaggaaacgatggtagaagaactcaaaaaagaaattgacattcttgctgaggaacactacgcaaaacttgaagctgaaaaagcaaaattaaaagaagaaacacaaaaagcttgacgggaacccgtcaagcttttttgtgttagaaaaatggaataataaatattccaagcactaatgaaacgacaccgatacccattgcccaggctccaaggccttgagcacctcttcttcttgcgatatagccgacaataataccggcagctcccaataaaacaggcagtacaaacaatgaaataatggacaaggctaaagcgatatatcctattccccgtccttcattgacattgccgccgctgcgatcattgtcttggtcattgctgcggtcagcagcacgataaggctctgcgatttcagcagctgtttcctcaaaaaaaccgtcattgtcgcgggtaatatttgtcccttcagatccatgatcaacatagtaactgttgttatcacgcttttcgtaatcgtttgccaccttcaattcccccttctgttttattaaaggagcttttatagtttgatccattttgcctgattcatgtttgctaaacttttctgttaatgtcaattgtttatgttacacttgaagggatgaaactgaaggagtgtgggcatgttacgcttaggaatagatattgacggcacaatcacggctcaggatacattcgtcccttatttgaaccgttcgtttaatctttccatttcattaaacgatatgacggattatgatttaacaaagctgttaaacattacccaggaagaattttgggattggatgaatcaaaatgaagcgatcatatataaggaagcattgcttgcacagcatgcgaaacagtcacttgattttctcaaagaggagcacaagcttatttatattacagcgagacggactcatttaactgatattacctatgaatggtttgacagacaaaacattcattatgaccacatcgaactcgttggcggtcatcacaaagttgaagcggtcaagaatcataacatcgacctgttttttgaggatcatcacgggaacgccatgatgattgcgaaagaagccgggataccggtgattttgttcaattccccttataatcagcttccgattgattcaaacatcatcagagtaaacaactggctagaagccgttcaatggatgaacaacaataagcatcacttaatacgtgtcaataactgaaaaaggagcccaaaccgggcccctttttcatatatacgcattttacgcagtagtgttttcttggttttccgctgtacaatcagggcatgtgccataaatctcaaatttatgcccgctgacctgatagccatccaaatcatcacaaagcttgtccatcggacatgattcaatttcctttgttttgccgcaggcaagacaaataaaatgatggtggtgatgggtgaatgaacacttaaatcggaagagcttttcaccggacagctcagttgtttccaaaatcccaagttcttcatataaagaaagatttctgtagattgtatcaaagcttaagcctggataatcatcattcagtgcagacagtacgtttttagcggtaagatatctgtctgaatcagcaaaaagctgcagcatatcctcccgtttgtttgtatatttatatccgttttcttttaataggttcagcgcttcttggacgttcatgaagggtcccccttttcgctttgcttaagaacgtatcacatgtatgaaaaagaaaatggcagctgtctgtccagcaagccattttctttactgcagataaaattatacccataaaatgaataaaagtaaatgaaagcctagtggattgcgtttttgaattttccgcctctcgtttcatgagtattcataattgttatgaatgcattttgatcaacttcaaacacgatcgatttgagctttgtcacttccagccttgtgacaaccgcgtaaattacgtctttttcttcgtccgtatatccgcctttccccttcagcttcgttgtgccccgaccgagacggtgcaaaatcgcgtcggaaatctcatcatactgctcagacacaataatgacagcttttgtttcatcaagcccttggatcacggcatcaatcgttttcatcgcaatataataagtcatgaatgagtacatcgcttgctcaggaccgaacacaaaaactgcccaaatgaaaatgaacacattgatgaacataacgaactcacctactgaaaacgggagttttttggtcagcaaaataccgagaatttctgtaccatccattgaacctccgtttcgaataacaagcccgacgccaaagccgagtaaaagacctccgaacacagtagccaaaataggctgggttgtaatggcttctacatggtgaagtgaggattcaataacggcaagcccgacaatccctataaacgtagagactagaaaggtcttaccgatatatttatatccgaagatcataaaaggaatatttaatatgacaacgaaaaaagcgaaattgagaaaggggtttgacataaagaggtggtctaaaataagtgatacaccgataatcccgccatcaataaaatcattggggattaaaaataattcaatacttacagccgcagatgcagctcctaccagaatcataaagaccctgaaaataaaatgggtaaatgtttctttcttatgttgttttgttggggtcataaaatctcctttcctgcaataactattttaaatacattataaatctattttaccattaaacactgacacattttactgatttgcccatacattaagtctggaggtggaatgaccaatgattttatttcaaagaattattttacagcggcttaatcaggctactgctgatgatttgctgaagtactcaaaacaatacggaatcagcttaacaagatcgcaggccgttgaagtagcgaacttgttatacgggaaaaatgtaaacatctttaatgagagtgaacgaatgcggctgttgaaacaagtagagacgattacatcgaaagaaacagctcaaacagttaatgaactattcaaacaatttacaagctaaaaaatgggggtgttatcccccattttttattgctgtaaaatcttttcgagcaatgtatcatcaaattgtttttctttcagcatgtcaatctcaaaacggtatggcggttttttgttctttttatcttcaccgacatatggtgtttcaagaatttttggaatgtcttttaactgctcatggtgaacaacatattgcagtgcgtcaaaacctatttcaccaaagccaatattttcatggcggtcttttctcgcacctttgacatttttgctgtcattgatatgaagcactttaatacggtcaatgccaatgactttatcgaactcattcagcactccgtcaaagtcttcgacaatgttatacccggcatcatgtgtatggcacgtgtcaaagcacactgacagctgctcattgtgtgtaacgccttcgataatctgtgcaagctcctcaaagcttctgccgcattctgatccttttccagccattgtttctaatgcaatctggacattttgattcggatcaatcacttcatttaagccttcaataatttttttgatgccggcttcagctcctgcccctacgtgagcgccaggatgaaggacaatttgcttcgctccgatggccgctgtccgttcaatttctgaacgaagaaaatcaacacccagctcaaaagtggacggatttgtcgtgttgccaatattaataatataaggcgcgtgtacgataatctcgtcaatgccgttttcttgcatatgtgcccggcctgcttctatatttaagtcttcaattttctttcggcgtgtattttgcggtgcgcctgtataaatcataaacgtattcgccccataagagactgcttcctggcttgctgccagaagcatatgttttccgctcatagagacgtgtgagcctattctcagcaacaggttcccctactttcttttcttagattggtttcttctctgttttttcttgattttctccatctcatagctcattttctttttatacccaggcttaaccttcttcggctttttcacgagacgatgagcaatttcatccgcttcattcggcgtttttttacgctttttgcggcgctgacggtcatcgccttttttccattcgcccttttcaagctctaagtaatcaaattcgatgcccattttttcaagtcttactaatgcatcctcatcagtaagctcataaatggtcatcgcttgtcctgatgagccggcacgagccgttctgcccacacggtgaacatagaaatcgagatcatccggcagctcatagttgataacatggctgacacctttaatatcaatacctcttgcggcaaggtcagttgcaatgatatatgtgaattccaaatcattgatctgcttcatgacttttttccgctcacgtggtgttaatccgccgtgcagcaagccgattttcatgcctttgccagtcagatactgggcaatatggtcagccgtatttttcgtgttggcaaacacaatccccaggtatggattcagatgcgacatgatgtcaaaaaggagcttgtccttgtcacgatgtttcgaaggaatgaggatatgctcgattttcgcagcagtcacctgttttggctccacatgggcgtatttcggattttccatgtatttcttcaagaatggtttcagcttttccggtatggtcgctgagaacacaagcatttgcagatcctcaggcatgcgggaaccgatgtaatctacatctgcaagaaatcccatgtccagcattaaatccgcttcatcaataacaagagattccgctttatgaacacttaacgcctgttctttgattaagtcagcaatccgtccgggtgtaccgacaacaagatgcggctgtattttcaatttatcaattgatttttgtttatcagtgcctccgataaaacatttcgagcgaatctgactgccttcctcaccctgcgtgattttaagcgcttcctgataaatctggttggctagctctcttgtcggagccgtaatgactacctgaacgacatccttagcaggatcgattttgtttaataaaggcagtaaataagcgtgagtctttccagtacccgtctgagactggccgatgacgctttctttttttaacactgcaggaatcagccttttctggatatcagtcggttcgtaaaaaccaaggcgatgtactgcatctataataaatggtttcaattcataaagttcaaatttcgtttctttcatttttcccagctccttaaagcggcacattatgtgtccatcatcacattatacccgattttgcttaaaaacaccacgtttgcaaggcgtttgttttattcagttatgtaaagcaaataccgcagcccatgcatattctaatagcagagagagctgaaaggaggtacaagtatgttttcaccgcagcagccaatgagaaattacccacagcccggaccgccccgccccatgccaaatcagcgaatgatgggcagaagaccgcctaatatgcgaggactttcatttggagcacagcagcaaggttttcagcaagccggacaatttcttcctcaggcaaatgccggagcgagaaatggtgcaggtgcaggcggaggcttaaaaggaatgctgtcaaggttcctacccggcggaggaggcgctggcagtgccggagttccaggagttccaggagcaggtgccgcagcgagcggaggtgctggcctgcaaggcattcaaaatatcgccaatcctgcatcattatccagtatgcttggaaatgtgcaaaaagtactcggcatggcgcagcaagtcacccctatgatccagcagtacggcccattagtccgcaatctgccagcaatgatgaagctgtacagccaattaagtaaaagtgatgatactgagacagaggccaatgaggaaagtgaaaaacaatccgtttcagaagaatcatcagaaaaagaaaaagagactgaaacaaaaacctcagatgggaacaaaaaatcaaaaccaaaaagttcttctctcccaaaaaaatctaaaacaactgacaataaagaacaagaatcaaaaacatctgcctcgaagaaaaaggaagctgcctctcctgctccgaaaagaacatcaggcagttcaaaaccgagattatatatttaacattctttgatatctgaagtgagattggctataatgagatcagaagaatgcaagaatagagccgtttgattacggctttttatattgcctttactcacttcagtattggaggacaaccgaaaatggacgtaattaaaatttcaccgcgcggctattgctatggtgttgttgatgctatggtcattgccaaaaatgcgtcactagataaaagcttgccaagacccatctatatactcgggatgattgttcataataaacacgtcactgatgcgtttgaagaggaagggatttttacattggacggctctaaccgtctggacatcttaaagcaggttgacaaaggaactgtcattttcactgcgcacggtgtttctcccgaagtcagaagaatcgcagaagaaaaagggttagtcgcaattgatgctacatgtccggatgtgacgaaaactcataatctaatcttagagatgaaagaaaaaggatatcacgtaatctatatcggcaaaaaagggcatccagagcctgagggagccgttggcgtagcgccggagatcgttcacttagttgaaacagaagaagatgtaaagaaccttgatatccaagcagagaagttaatcgtgacgaatcaaacaacaatgtctcaatgggatgtccacgacattatggagcttgtcaaagaaaaatatcctcatgtcgaatatcaccaagagatttgcctcgctactcaagtgcggcaggaagctgtatcagagcaggcaaaaaaagcggacttaacaatcgttgtcggagacccgaaaagcaacaattcaaataggcttgctcaagtgtcagaggaaatagccgggacaaaagcataccggatcggcgacttaagcgaattgaagctcgaatggctgaaaggcgttaataccgttgcagttacagcgggagcttccacaccgacgccgatcacaaaagaagtcattcgctttttagaacagtttgatcacgaagatccatcaacttggacaactgaacataatataccgctcaaaaaaatacttccaaaagtaaaagcaaaaaactgaggctgtaaaagcctcagtttttttatagaaatgtaaatggatttgtatctgtttcagaaacaaagatattcacgtcaaactttttatcattacacattgatgtcagctttctcgtgacgccttctttcatgattttttccgcatagtgtcccggatcaaccacatttaggccaagcatcatggcatcatgggccacatggaagtataaatcccctgtgacgtaaacatcggctccctttcgttttgcatgatgaatatacttgtttccatctcccccaagaacagctacctttttcaccatgctgtcagcatcccccaccattctgacaccattgacgtcaagcttgtctttcacaaataaagcgaattccttgagcgtcatctcatttttaagggttccgacacggccgagtcctttttcggcaggagtctgttcaacaggatagatatcgtaagcaacttcttcatatggatggctttttatcattgcattgataacagctttttcgacgcttttaggaaatacagtctcaagccttacttcatgaacaagctcaagctctcccacttcaccgataaaaggcttagctccgtctaatggtttaaaactgccgattccttcagatgaaaacgcgcaatggctgtattcaccgatatggccagcccccgcatttccgagcgcggctctgacctgctcttcatattccttcggcacgtatactgccagctttttcagaggatccgtataagtaggcaccagcacttccgtctcactcagctctaatgcttcagcaagcaaatcattcacaccgccgtccgcaacgtctaaatttgtatgagctgcataaacagcaatatcatgcttcaaacacttttcaattaaccttccggcaggctgatctgttgaaatatgctttagcggccggaaaattggtggatggtgtgcaataatcaagtcaacctctttttcaatcgcttcatcgataacgctctctaacacatcaagtgtaaccatcacatttttaattggtttgtttaaggtgccgatttgcaggccgattttatctccttcaaccgcataggctttcggggaaaattgttcaaacagctggatgatctgctgcccatttacacttttagccatgatcgattacctcctttaacagctccattcgatcggcgagctcctttaatttttgtttgttttgctctgtatccgccgcttggctgatctgttcataaatgctttgagtgtgctgaagctcttgtgtccactttttcaaaaagacagcatttttttcttttgccaagaaagggccaacgagcatcccggctgataaagaaataccgtcataagccgcatccctgtctcccgcttctgccaccagcacctcatagcactttccgtcctcttcaaggattacctcatctatcagcgcatatctttctttataaagccactccctgatatgaacagcatgaatattcggctgtaaaatgagccgttccttccccgttaatttgtctttgcccgcttctaaaatatgagcgatcaaagatccgcccattccggcaatcgtaatggcatcagcttcaccttttttaatcacttccagtccgtctccctgccttacagaaatgtgcgagtttaagcctgatttttcaacctgccgctttgcagacaaaaatgggccgtctgttatttctccggcaatcgccccgctggctttatgattcagcaccgcaaaacaaggaaggtaggcgtggtcagagccgatatcggccatcaccgctccattcggtatgtactccgctactgtttgcaatcgtttagataattttaattcgttcacttgtcatcacaacttttctcaatcattttttcctttactatcatataaaaaatcagcccggaatccaagctgaagcaaatgattttgaaattatttcttttgatgggggtctgcacgcggcagtcaaaaataaaaggctgtcgagaacatctcggcggcctgtgaatgtataaagagaaaaatggttcttttatttaatttttgacacccactctgccatatcatccagcttatcggccggtacaagaccggaaggcattccattaccgcctttttcgatctttgttttaatttcagcgacatctttcttatcccctacaccttttaagctaggacccgaaacaccttcataattttcaccgtggcatgcgatgcagtttgccttgtaaatttcttctggtgaagcgtttgcatctttcttttcagcagatttgctttctcctccgcttgcaatctcccgagagtcatcaagtccttttactgataaaaagaaagttagaccaattcctaaaacagcgatcagcaaaaatggaataagcgggttccatttcatttcccttccccctttttgatccttccccctatgtaaacacttctaattctaacttatttttacaaaaagtaaatggattgctatacaaaagttttttattcacactttatacaaaattgaattgaaacatgcctaaatctctaatatcctttttattctattgtataatgtattgtatacgcttacaatagaaaatatggaattagattttgaaatttttcaccacaatgttcatttgcaaatgacatcatttttcagtaaaataaaggcatattatccatatatctttttaaaaaaaagaagaacggatcttcaagacccgttccatcttattcaaggaaatctttcaaacgtttacttctgctaggatgtcttagtttccgcaacgctttggcttcgatttgtcgaatacgctctctcgttactccaaatactttgccgacctcttctaatgttcttgtacggccgtcatcaagaccgaatcgaagacgcaatacattttcttcacgatcagttaacgtatcaagcacatcttccagctgctctttcaatagctcgtatgcggcgtggtcagaaggtgaagttgcttcttggtcttcaatgaaatcaccaaggtgcgagtcatcctcttcaccgatcggtgtttccagagataccggctcttgagcaatctttaagatttcgcgtactttttcaggcgttaaatccatatcttccgcaatttcttcaggtgttggttctctgcctaagtcttgcagtaattgacgctgcacacggattaatttattaatggtttcaaccatatgaacgggaatccggatcgttctcgcctgatcggcaatggcgcgtgtaatcgcctgtctgatccaccacgtagcatacgtactgaatttataacctttgcgataatcaaatttttcaacggctttcatcaggcccatgtttccttcctggatcagatcaaggaacagcataccgcgtccgacataccgttttgcgatactgacaacaagccgcaggttcgcttcagccaatctgcgtttagattcttcgtcaccttcttcaatcttttgagcgtaggcgatttcttcttttgcagaaagaaggttaacccgaccgatttcctttaaatacatacgaactgggtcattgattttaacgccaggcggtacacttaggtcattaaggtcaaattcttcttcggctttggcaagctgctgaatattaggatcttctgtttcttcattctcactaattaattcaacaccttgttcacctaaaaattcataatactcatccatttggtctgattcaatttcaaagctggacatacgctcagcaatttcttcatatgtcaaaacgccacgttttttaccagactctgttaattgctcttttacttggtcgaatgttaattctgtctcgtgggtttgtttatcagccattatggatccctccttccaaagcttgcaacgaattctataagcggtatgattcttattcggtccattcaggcgttttctatgtgaactgcctttaacaatgtgcgaataatgaaatgacaattcatgatgaggttaagcgatctatttgctcctccgcaaggaatcattgccaataaatgctcctcatcagttctccagttattttaaagatcggttcaatgtaacgatttcttgagccagagaagcagctcttaaaaaatctttttgcctttcggcttcggctctttccgcctctttttcttttatcattgaccaatttctttgattcaacactttttttacataatctgataactcggcttcgctaagctcttgattaacctgaagcattaatatatcggacaagagctggcttatatgatcatccgtcaccctggccatcagatgctgaggcgtcagctcggctccctcttcataaaaagcataaagataagcggctaatgcccggtgctcatcaatattaaattgaaaccctacccggtcaatcacttttttgatgacgctccgatctcgaagcatgtgagcgagtaacagcctttctgcattttcatacgccggacgcaaacgtttttgccttgcttttgtcgtcagatgcgctcgccgcgtttttgtttcaccgctattgtcagcaggtttgttttgcttgctgaaaacagacagctgctcagttaaagactcctgtgaaagcgaaaactctgaagcaagctgctttacatagacttcctgctctagagaccctgaaagcgtgctgatttctttcagtacgtctttaatgtaagctaggcggtcgccttcatcggacaggttctttccttttcggaaatattgcattttgaacgccattacggtgacacttgcgtcaataatgtcgtttttaaatttttccccgccgaattttttgatgtaatcatcagggtccaatccgtcaggaatcattgcaactctgactttgcagccttttttttgcagaagctccgaagcttttaaggtggcttcataaccggctttatcagagtcatagcaaagaatgatttcttcgacgtttcttctcaggatcttgacatgatcatctgtaagagacgttcccatcgtggctatgctttcctttacacccgagcttacggccgatatgacatcagcaaacccttcaaataagactgctctttcctgctttctgatatgaaggcgggccttataaaaattgtaaagcagtttgcttttatgaaagagcggggtttcaggactgttcatatacttaggctgctggctgccaagagccctgcctgagaaagcaacaacagccccgtgatgatcatggatcggaaacatgacacggtttctgaagcggtcgaaatatccgcttccgtcttcgcgtctgatcaggagacccgctttttccatttgcgcctcactaaatcccctctttacaaggaatttcgtgataaagtcccaagaatcaagagcatagccaatctgaaattcattaatcagctctttcgtaaagcccctagaaagcagataatccagtgcctcttgaccttcttttgtatttattaacaaatgatggtaaaatttcttcaggagctcatgtgcctcagccattttttgttctccagaagactctggccgggctccggaatggactgttatatcatctggaaaatcaatttggtatttgtcagcaaggtgagaaaccgactcggcaaaagaatagccttccatctgccttaaaaaagagaaaacattgccgcccgctccgcagccaaagcaatgaaaaatctgtttgtcgggcgatacggaaaacgaaggtgtgctttctccatgaaaaggacagagtccaaagtagtttcggccttgcttctttaattgaacataatcacctatgacttcaacgatatctgccgacttttgcacctgatccacaatttcatctggtatccgatttcccatcttataacactccgtcgtacattattcgatgctttagtgcaaaatcccttcatcgttcgacaggattttttgcagcagtgtaataaatcgttctcgatcttctttattcaattttttaggccctttggcatatacgccttttcttctttgtttgccggaaaaatgacggccctctagggcaaaatcaatcgtgtcttccttgtaaagacgacctctttccgacataacagagacatttctgttcaacagcagagatgctaatccgatgtcctgcgtcacaacaatatctcccggtttcacgtgatttgcgatatataaatcagcagcttctttatgaggatcaacatacttccatttttcttcattgcttctggaaagctgataatgttcaaatgaagcgacaaaaagaacttgaacttcatactcggatgctgtttgtaaaatttcatcttttaccggacaagcatcagcatcgacaaaaatcgtcttttcttgttcattaagaagagtaattctccatccctccattaaactcctgcataaaagcaagcaaaatcgcacatcctttattattgtggatgtatatgaatttgtcgaaaaatttccgggagaaattcttgacatcttacccataatagtttattcgtatcacacgatccttaaacctaaaattaatcattttatcacaattttttattataatacaaacttcacaaagatgctattgtttttcattattcccttttggcacagccaaaaacccaggatagagcgtcctgagttatatgttttttgttttgagatgatggataatatttgctgtttcctcaaccgctttatttgaaacatcaacaacctggcagccgatccgatccacaatcttttcgaaatactcgagttcctctttgattctgttgatatttgcataaatcgctttatcattaagcccgagtgattttaaacgttcttttctgatatgattcagtttatcagggctaatctttaaaccgatgcattttttcggatcaacgttaaagagttcttccggcggatcaacctccggtacaatcggaacattggcaaccttcaggcgtttgtgtgcgagatattgagacagcggtgttttagacgttcttgacacgccgatcaaaacgatatcagcttttaaaatccctcttggatcacgtccatcatcgtatttaactgcaaactcgatggcctccacttttttgaaataatcttcatcaagctggcgcacccgccccggttcgtatttcgctgttaaaccgtaggctgtttccattttatcaatcaacgggccgataatatcataatataaaacatttgctttttccgcttcggctatcaaatattctctgatttccggcaccacgagtgtaaaacagataatgccgcagtctgcctttgcaagtgaaatcacttcattgatagtgcctatatcttcaacataaggaattcttcttacatgagtatcatccgccgatccgttaaattggctgagtgctgcttttactaccaattcagccgtttcaccgacggaatccgatacaacatagatgatgcggttattcatattatccccccgttagtttgcaatcttataggatttcattttcagataaactgacaagtattttggtcatatttgtttttgtcactctgccgatcacttcaaagcctttatcggtgtctttgatgacaggcagtgcatcaatttgtttttctattaagtgctttgcaatgtccatcacataatcctcgcgtctgcacaccgtaatgttcggcatccttgtcatgatgatgtgaacagggaccgatgtaagctcctgctggccaatgctcgctctgagcaagtcttttcgtgaaagcaccccgactaaaacagcatcgcggtccaccacaaacagagtacctacatcttctaaaaacatggtgcaaatcgcatcgtacacagaaacgttttcgtgaatcactacggggatagattgaaagtctttcacctgaagctttttgagtttatccgccaaaagctgtgtgccggtttttcccgtatagaaataaccgactctcgggcgcgcctcgaggaatcctgacatggtgagtatggctaaatccgggcgcaatgtcgccctggttaggttcagcttttctgcaatatgctcccctgtaatcggcccgttttcttttacaatctgcaaaatatgttcttgccgtttatttagttcgatcgtactcaccaccttttcacttcatagctatgtaaagaaataataatccatattataacgtaaatatcttgtaatcaaacaaaaaacttataaatggggaaaagacgattaccgatcacacagcaaccgccttttctctctttattttacaataagggcattcatattcgcaaaggacttgatctcatccgccaagcttaccatttgcgctaaacgatttgcctttaatgactcattatccgctataaccattgtatgatcgaagtaagcatcgatcggttcttttaaggctgcaagtgaagcaagcgccgcctcataatcttttttgctgaagttttcctgcagattttgcttcgctgtttggtaggcatcaaacagttttgcttcgtattcattttcaaacagatcaggctgaatgtctccgcggactccttttttgctgatagagatcactcggcctaacgcttcggctgtttccttaaagccaggtgcaccaagcttttgctccagtacttgtgctttatgcagcgcagagtacggctcaagctcagagctttccagcacggcgtcaatgacatcatgtctgatttgttcagcattcaagacatatttcaagcgctgagtgaagaaatccagcagttcattttctttatcggtttgaacgaaagtaagcagctcttcaaatgaaattccccagttgcggtcaagaagaatcgcaacaataccgcttgcttggcggcgcagtccgtaagggtcctgggaaccggtcggaattacgccgatagagaagaatgaagcgattgtgtcaagcttatccgccattgctacaacagctccggtgaaagtagaaggcgtttctccgcccgctgatctaggcatataatgttcattaactgccgcagccacagcttcatcttcgccaagcattctcgcatacttttcgcccataattccttgaagttcagggaattcatatatcatatgcgtcacaaggtcgaatttagaaatttcagcagcccgcttcacatgttttaatgtatcttcatcagcctgaagacgaacggcaagtttctctgcgattgatgtgactctcctaaccttatcagcaagagaaccaagctcttcatggaaaacgatattttcaagtttcttcacatttgcatcaatgtttagtttctgatcttccttgtagaagaatgaagcatcagataaacgtgcgcgcagcactttttcattgcctcgggccacattttcaatcgcgtggctgttgccgtttcggactgtgataaagtgaggcagcaggtcaccgtttttgtctttgacagggaagtagcgctgatgctctttcattgttgtgacaagcacttcttcaggaattgacagaaactcggattcaaatgaaccgtaaagagctgtcgggtattctactaaatgattcacttcatcaagaaggtcttcgtcaactggaatgctccaattgttttcagcagccattgtttccagctgagattgaatcatttgctttcggacgctaggatcagcaataacatgctgttctttcagctgctcttcataagctgaaggtgattcaattgacgcttcatgtccgaggaaacggtgtccctgtgttgtccgtccagactcaacgtttgtgatcgaaaatggaatgacatcctgtccaaataatgcgacaatccatttgatcggtcggatataacgcaaatcttcatttccccagcgcatgtttttcgggaaatgcaagcttgtaattaaaccgctcaattctggcagaagcgacttcgtttcttggccggcttggaatttttgcacgaatacatactctatgccttttacttctttgatgtacaggtcttccacatttgcgccttggccttttgaaaagccgattgccgcttttgtccagttcccgtccgcatcaagggcaatttttttcgcaggcccttttgcttcttcttttatatcatcctgcttttctgcgacatccttaacgaacacagcaagacgtctcggtgtattgaagagtttcacttcaccgtgagtaatatttttttctttaagccagcctgtcagcttgtcgccaagctgaaccatgctttcattcaaaaagcgcgccggcatttcctctaatccgatctctaaaagtaaatcctgtttactcatgagaagaaccctcccctttaagcattgggaaccctagtttttctcgttcctcatagtaggtttttgctacttttctagctaaattccgcactcttgcgatatagcccgtccgctcggtaacagagatcgcacctttggcatcaagcaggttgaaagtgtgcgagcatttcagcacatagtcatatgctggatgaacaagtccgttgtccatttgcttgatcgcttctttttcatatgtgctgaacaattggaacagcatatcgacgtctgatgtttcaaacgtataaacagaatgctcatattcagccatcatgaataaatcttttactgtaaaccctgacgtccattccaagtcaaacacgttttctttatcctggatataagacgcgagacgctcaattccatacgtaatctctacagaaacaggtttacactctaatcccccgacctgctggaaatacgtaaattgtgttatttccattccgtcaagccaaacttcccagcctagacccgcgcagcctaaagacggattctcccagttgtcttcaacaaagcgaatatcgtgctcaagcggatcaattccaagagcacgcaaggaatccaaatacagctcttgaatgttatcaggtgacggtttaataatgacctggaactgatgatgctgatacagtctgttcgggttctccccgtagcggccgtctgccggacgtctggaaggctctacataagccactttccacggctcaggaccgatactgcgcaaaaatgtatacgggctcatcgtgccggctcctttttctacatcgtaagcctgcataagcacacagccctgactggaccaatgcttttgcaaggttagaatcatgtcttgaatattcatttcaagcacctccacttttctttcataagttgactgcgacagcaaccaaaaaactcccgtctctatgcttgccagccgcaaacatagggacgagagttctcccgcggttccaccctagttgctgagaacaaaatcccagcctcttttttaaaattgctcaagaatgcctttcgttgcgtgctcatccttagcttccaccgccctaaggtcgctttcatgaggtaaacgcaagtacttctttctctcactgcaacatattttataataaatgatcatataaaaagatggaccaaaagtcaacttttgttttcacccataagatgtttcatgctttccatttgatctaaaaagcgctttgattttaaatacaatcccgaatattcttcgtaatataaatcaatcacttgctttaattcagcttttgtttcctcttttaaggacacattgccgagcctcgacagatcaaaatagtaaaagagtcttaacagccttgccgtttgcggtttgatcggtatcctgtaaggatctttttcaaaacagcggtggcatataaaaccattatcacgaacagagaaatgaaaggttccgtcttggcttttacaatgtacacaatgatttagctcaggatacaggcccatgacaccgagcatcttcatttgaacaatgaaggtgataacatccggatctgttccttcattcagctgttttaatgactctaatatgaattcaaataaataaggatttggctttttttcttctgtgcctctgtcgactaactcagcaatataggcagcatatgctgttaaaaacaagtcttccctgatgcctctcatgctgaggatcatttccccctgctgaagcgttccgaggcccgatgttttttgcattaagaaagaaccatacaaaaagggctggctgactgctgataaacggctgttcggttttttggcgcctcgtgccataacacctatttttccgtgttctcttgtcagtaaagttacgattttattcgtctctccgtaatcatttgtgcgaagaacgattccttcacattttgtcagcatttccgcaccttcctcaagcaggagcggccaagaggtttataaaattggataatcaaatcgggctagctcatcttctagttcttcgggtctttccatgttctctttttccagttctttaaaaagaagatacgtatcaacatttcctgtttgagaaaatacgttccaggtaaaattcaacacaagaaacccacctttctgtagttaaactagcttacctaaactccaaattcttacctttatcttgaccagatgtcctccatttcatgttaaacaaaatttgctaatgtatccctgttcctgtgagataatgacacacacagctagagattaatattcgtcctctttaaagccaaaatcgcgaagctgggacattttattacgccagtctttctgcactttcacccacaattcaaggtagacacgggagcccaacagtgcttcaatatccgctctcgctctttttccaacctcttttagaaggcttccttttttaccgatcacgatgcctttctgggaatcccgctcgaccacaatcgttgccgctacgtgcacagaaccgttgtcctgccctttgatggattcgatggccaccgcaatgctgtgcgggatttcttctctcgtcaaatgcagcaccttttccctgattaattcagaaatgataaatcgctcagggtggtcagttacctggtcactcggatagaattgcggcccttccggcaaatacgcttcaatctgagcgagcaaggtttcgatgttatttccttctaaagcagaaatcggaacaatttccttaaaaggataacgtttgcggtattcgtcaattagcagaagcaattggtcgggatgaattttatcgattttgtttacgattaagaatacaggcgtagacatcgtctgcaatttctcaatgatgaattcgtcgcccttcccgtagccttcctcagcattgatcataaacaagatcaaatcgacttcttttaatgtattttgcgccactttcatcataaagtccccaagtttatgcttaggtttatgaatccctggtgtgtcaataaaaatggtttgtgatgtgcctgtcgtcagtactccttgcaccttgtttctcgtcgtttggggcttatcgctcatgatcgcgattttttgtccaatgactctgttcaaaaatgtagattttcctacgtttggtcttccaataatggatacaaatcctgatttaaagctttcgttcgtcatgtaaatcctccgatgaaaatgcgcctggcaataattcttccacagtcatttcttttatttgtccttgtaaattagtcagtacgacaataacgtcttttgtgcaaagctcagaaatcacctgtcggcaggctccgcacggagatactggtccaggggtgtcagccgcaacggccagcatctgaaactctgtatccccttcagaaacagctttaaataaagcggtacgctcggcgcaattgcacatgctgtatgccgcgttctcaatattgcagcctctgtacacttttccatccttggtaagaagagcggctcctacttggaatttggaatacggcgcatatgccatatcacgcgcttttaaagcttctgttattaattcttgtctgttcatgtgtacattcctctcttacctataatggtaccgctatcactttatattttacataatcgcgcgctttttttcacgcccatttctaaaaatgtaaaataaatgtaagaattttcagccattacagctttggcaaaaaaataagtaaaccaatgatacacgaaatcacggcaaaaacgcaaacagccccggcggcagcgtccttggccgctttagcaagagggtgatgtttgtcagttattaaatcaaccgtatgttcaatggctgtatttaaaagttcaagcgaaaacataccgcctatcaaaaggaatataatcatccactcaatcatgctgagctctacaaggaagccgcaaatgagaacagcgcaggcggctgcggcatgaaattggaaattccgctccgtccgcgctgtttcccatatgccccggcctgcatgcacgaagcttttgaagaatcgattcagctcatttctatgatcttttgagtccataagcgtccagcaattccttttgcttagtaaacatctcctcttcttcctctttcgtcatatggtcatatcctaaaaggtgcagaaatccgtgtacagctagaaatccgagctctcttttaaaagaatgattatactcctctgcctgctctcttgtgcgatcggcactgatgataatatcacctaaaaccggaggcatttcggcgcccacgatttcgatctcgccttccccctcttcttcaagagcaaatgagatgacatctgtcggagcatcctttccccggtattctttgttaatctgatgtatgtcatcattggaaacaatcgtgacagaaacttcagcctgatcctgaacgccttcacgctcagcggcaaattgaagcagattttctacttctttgagcatctcttctgagacgcttcccgtttcatcaacgatatcaatcagtaaactcatctatttcaccttcttagtagcctccggatattcaatccgggagtggaaaattccttttaatgttgcacagagcgtttttgcgattgtatccagctctttaaatgtcaaatcgcattcactgaactgtccgtcctgaagcttatcggatataataccccggacaagcttttcaattcgttcaggatttggattatgcatggatctgacggccgcttcaacactgtcggccactgatataattgcggcttcctttgactgcggcttcggccccggataacggaactcttcctctgtaatctggtcgcctttttccttcgctttatagtaaaaaaactttaaaagcgaggttccatgatgctgctcagcaatatcgacaagctctttcggaaatttatagcttctcagcatattcgcaccgtctgtcgtatgcgagataataatatttttactcaactgaggtgacagcttgtcatgcggattgtcaatattcatttggttttcaataaaatattgcgggcgctttgtttttccgagatcgtgataatatgcgccgactcttgcaagcaaaccattagccccaaccgcttcacaggctgcctctgataaattggcaaccattacactgtgatgatatgtacctggtgtttctgtcagtattttgcgcaatagcggatggttaggattagacagctcgagcagcctcatggtggataaaatgccaaagcccgtctcaaaaaacggcatcaggccgatgatcaatacagatgaagcaaaccccgacacaacccccatgagcattaacgtgccgatttcaagacccgacagcgcagtgttctggatcaataataaggatagaacgacaaccatattaataaacgccacgaaaagtccggtctgcaaaatctttgatcttgcattgtgttttcctaaaaataatacacctgaaatgccgctgatcaaataataaatccctatgacataattgaatgttcctgtcacaccctgattaaacatcatacttccgcaaatcgcaagaatgatacttcccaaaatggcaatgcgttcattcatcagcagtttgattaagatggcgcctgccgcaatggggaccagatagccgatattattatactccatcttctgaaacaaactgacaacctccatgatcacaagcaaaagtgttgtgataatcgagaataacagaatggattggtttttaaacttcagattttgtttctgtttttcaaaataatatacaagtgttgcaatgaaaagtccgatcataatcaatagcccgctgatcggtttaaagagatttgagttatttaataacccagtcagctcaagtttcctgtacacttcccgatcaatgaggtcattttcttccacgagcacttgcccctgtttgatttggacctgctggacattatctgaggcttcctgccgttttgcctctgttgctttcggatcgaaaacgtaattcggaataatagcaaaacgcccgatttctgtcgcagctcccaagtatttagacggaatagaattgctctttagctctttttctaccttatcctttgcatcagatagtttatccgaggggatttcactgctcatgaccgtatttactgcggtaatgaccgtatctctgacaaaagaaaagtcttcactgtctgctttcagcaatgtcttgatggaatcctccgatatagaatcattcacatctgatgtcaatttgtcctttacagatttgaccattgatttttccgatggtgatttactgccttcctccgatgattttttcacttcactaatactgtcgaatattgatgacacaaggtcaatccgattgtctgtatattctttttttaatgtatattgatcttcaaccgcgtcctcagcggcttgctttttttcctctgtggctttttgatcttctacggttgccggagcgtaaatggtcttgtcgctgactgaaaacaggtctaaatcaagtgtttccggcttaacatgtacaaagagcaaagcaaacataatggcagccagcagaagatacagcagtacatgcatggagcgggcatttttaaaactgctccattttttcgagctgcttttggtcttagccttctttttcaacacaagaacctcctcttgaaacatcaagcccataagcaatcataaaaatgacccgataacgcgcgatcgggtcattcagcattaattttgcttatcgtatgcttcaataattttcgcaacaagcggatgtctgaccacgtctgtctggtctagctcaatcatagaaatgccgtctattcctttcagcatctccttcgctactgcaagtcccgatttgacgcctttcggcagatcaatttggctgacgtcacctgtaatgatcattttagagccaaaacccagtctcgtcaaaaacattttcatttgagcaggcgtggtattttgtgcttcatcaagtataacataagcatcatcgagcgtccgccccctcatatatgcgagcggagcaatttcaatgatgcctctttccatcagacgttctgtatgatctgccccaagcacatcatggagagcgtcatacagcgggcgcaaataaggatctactttttcttttaggtcacctgggagaaaaccaaggctttcaccggcttccacggcaggtcttgttaaaatgatttttttgatatgtccgttttttaaagcatggactgcttttacgacagccaggtacgttttcccggttcccgccggaccaatgccgaatacaaggtcattccgcttcatagcggccacgtattcccgctgtcccattgtttttacacggattgatttgccttttgcgttttttgtaatttcttcttcatacatgctttcaaagtattcaagttcattcttctttgccattttgatggcgtaaatcacatcacgttcagagatctctatccccttgcgaattaaagcgaggagcgatcccagcagcctgtctgcaatctgaaacgattcatcatcgcctgacacataaatcgtctcgccgcgcgtaatgatatttacattcagatctttctccatcaatttcaaaaaagaatcttggttcccgaagagtgaaagcgcctcgtccgggtttttcagtttttgattcatcgcaagtaaatgttctgtcattcttcagtctccctgacaataggtgtggtttgaacgatatcttctataacttggtagagaataatcaactttactttaccattctcaacagtctggtgcaaaactttttcacttttcacctcgccgttttcgcctattttatcctctacatcctgtttacccaatttaatgccttcttgaactgcttcttctttcgtatattttcgcaaagcctcttcactttctctcgtttgctctttgacataggatacagggagcttaaatccgagaaaatgaagcgaatgcttttcttgttctgtttttggatgcttcaattcctcttttttaaacgtcatcccccagatcgggattgccaaagaaccaaaagaaagcttgtgctttgtccttactttgcccgtatagacgttaaataatgtttcaagcgggactgtcacttctgatctataccaggtttctccgtaaatttctgcttttgaggcgacttcctgctgatggtcttcgctgccgatcagtcccgaaacaagcagctgtcccttttcaacatgatcgtgtatggcggccatgggctgtcctttttgcacaaacattctcgtaatggttgctttctttttggcgacaatattgcgcgggctaacatatttttctttttcgggctcatttttctccacaactttcatatgaatggtcgtccccttcagatcaactccgacccaagtgatattgtctattccattggttaatgatttctgtattttttcgggcgacatcattaaaaactgcagacggccctttttgacgccgatttcattaagatgctgcctcatttgatgttctgtttcaggcttagcgcctgtcacatcaattttccacaccatattggacagcaaaaacaaaagaatgaaaaaaatcgcaaaaccgatcgtaaaccctatattcagctttgatttcagcaacaggaagggaaatcccttccgattgataaatcgggctttacatttaaatttacttcttacccgccgaaaggcatgtacatcctgaagctgtatatataacgatacggcttctttcttttttttgacatgaaagaccggaatcccctgtcttgtgcattcattaaggagccgctcaatccctcttcccgtcaattcaagctggaccttacccgaaaaaaaagacagccatttatttttcacaacatttccccctcggctttatgactcaacatatcgaacgacatcaatcgtaccctccaaaagtatctcttccggaagaatcgccttgatgacaaaatttttaccagatatgatgcactggccctgcttcagcatcagccgcacttcattctcactgaaaagcaaaaggcctctgtggttttctatgtagatatgaagtctgccaaccattgtaatcctcggcagatccatcataacgtccgggggaatttccaatgctcttgtcagccaagctttcatacgattctttctttgccccatacaaaaagaaccccctttcatctcatatgtatgatttgaaaggaggttctaacactttaatttttacgggccgggcgcatcgtacggtgaggttttttcgcccgtggaggtccgaacacctctcctagaacgatcccctgtacgacggtgtctttattcacctgaagcattttttgttttgtgtatactgttttttgtttggcagcagcaagatctcgttccagccctttcaggtttcttgctgtttccctgcgtctttcttccgcttcccgtcttgcctgttccatacggttagggataggtgcaggggcatcttcttttgactgcttcttttgaggagaagcagattgcatgtgttgaggttttttacttttttggctgttttgcttttcttctttgctctttttgccgaaaatcgcagaaatgattccgatgatcgctgcaataataagcggattggtcagtaaatcttccatcagcgttctcccttcttagagagattatgatttgcggtcttcatccgaagggtctttcgtcagcttgccgaatgaatcacgcatttctgtgtcagcatcgatgttcttgatattcatgtaatccatgacgccaatattcccttcacgcaaagcttctgccatcgcaagcggcacttccgcctcggcttctaccactttcgcgcgcatttcttctacgcgggcacgcatttcctgttcttgagcgacagccatcgcacgtcgttcttccgcttttgcctgcgcgatgtttttatcagcctcggcctgatcggtttgtaaaattgccccgatgtttttgccgatatctacatctgcaatatcaattgagagaatttcaaacgcagttcctgagtccaatccttttccaaggactgtctgagaaatcatgtcagggttttcaagcacttttttatgattatcagatgaaccgattgtagaaacgatcccctcacctacacgagctacaatggtttcttcccctgctcccccaacgaggcgctcgatattcgctcttactgtgattctcgctttcgctttcacttcaatcccgtccattgcaacaccggcaatgaacggtgtttcaatcaccttaggattaacgctcatttgaacagcttccaacacgtcccggcctgcaagatcaatggcagcacagcgctcgaatgtgagttcaatgttagctcgctgagcggcgataagcgcgttgacgactctgtcaacattacctccagccaggtagtggctttcaagctggtttgttccaacattaagtcccgctttatgggctttaatcagcgggttaacaacccgattcggaatgacacggcgaagcctcatcccaactagagtgaaaatgctgattttcactccggctgccaaagctgaaatccaaagcattacaggcacaaatgtaaaaaatactgccaaaacaatgatcgctactgcgacaattgccagaatcataagtgttgacggatccatataacttctcctcgtttctatttaaatttctctcacgacaatgcgtgagccttctactttaatcacttttacttttttatctttttctgtaaacgatccctccgaaacaacgtcaaggcgttcatcatcaataatcacggtaccggaaggacgcagcggtgtaaaggttatacccacttttcccattaagtccgtgcgcgtttgatttgaaacgtagccgctctccgtgtttgtagaatcatttaatatcaatttcttaaagaatttcatacgctttcccaacacccttgtcagtaaaataaaagctgtaatcgaaacagctgaggcgatcaagagagaaaccgccatgacagtgaagctccccgcggctaaaaacaggctcgcaataatcgctcccaaacccagtaatccaatgattcctccgggaagaaaaatctcaagcagaatgagaatcacccctgctataaagaggagaaccgtctcatacccggcaaggccggctgcaagatgcccgtaaaagaacagcaataacgcaatgagtccagccgttccagggaggccgacacccggggaaaaaagctctaccgtcagacctaaaaaagcgattgtcagcagaatagggacaatgaccggattcgtcagccatcttgctgtcttttctgcaaagctctcctttgcatagctgatctgcgccttttcgaacccaagcttctttacgagcgtggacaaattgtcagcagtgccttctgaatagcctacctcaatcgccttgtctgcgttaagtgtcagcagatctcccttaggcgcgccaacttccttggcatctatatctgggtcagccattgcgagcgcatattttggatcgcggttatttttcactgcggcatcttccatctctgccagccaaagtgattgagctttttggtcagcggcattgccttggccatcaacaatcgcggaggctcccatttttccgccaggcgccatataaatgtgatctgcttgaagtgcaatatatgcaccagcagacaacgcgcgtttgttgacatatgcagttacggggatctcactttcggttatcaaatcggccatatcaatagcagatttgaccaatccccccggggtattgatatcaagaataatatggtctgcatgtgcatcctttgcgtcttgtaacgaacgggacaaaaacgaggcgagaccctgttcgacatttttttcaaccgggatcacataaacagtttgtttttctgcttttgcgttcagctgtacgcctaataaagaaagtaaaaatatacccaaaagagcagcacggaatcctttgatttgaagcaagggcggtgtatccctccttccttttataataagtgccttctcttcatacgtaacaaatgtatcaaaggtttcatttttttatgtataaaaaaagacatctctcttagaaagatgtccttttctttgccatttaagacagttgactgctcacaagcttattaattaaacttccgtcagctttaccttttactttaggcataattgcccccatcactttgcctatgtccgcttttgagctcgcaccgacctccgcgatggtttcatttacgattgtacgcagctcttcttctgacagctgctcaggtaaataaacttctaaaatgtccagctctttttgaactttatctactaaatctaaacgattagcgtttgaaaattcctggagggagtctttacgttgcttaagttcacgagaaaggacagtgagttcctcatcctcggtcaaactgtctttcttaagcttaattgcttcattttgaagtgaagccttaaccattcgaacgacagtcagtttgtctttctcacggtttttcatatacagcttcatatcctggttgagacgctcaagaagactcataaatccaccctcttttagaatttgcgttttctagcagcttcagactttttcttgcgctttacgctaggtttttcataaaattcacgctttcttgcttcttgcaaagtacctgtctttgatacactgcgtttgaagcgacgaagagcatcttcaagcgattcgttttttctaacgaccgtttttgacattctctttccctccctccgaatacaccaatcgactacctttaagttacacatataaacatgtactttgacattataatataagccatcagtcaggtcaactaagtgagttcacttttccgtcatgagtgcgactgcctgtctatataatgaaagaaaggggttggtgaataggatgttaattctgattagctttactgctcttatattattctttctcgcaggcatgaacatgcttcgaaaaggcttaatttctatggcgtactcaaaaattgaagaacgtttgcttttatttacggaccatccgttaaaagcgtttcttatcagcattgtatttacgggaatacttcagagcagttcagcttttatggtcattgtcatcggctttgtaagtgcgggcgttctttcttttaagcggacgataccaatgattctggggacgaatgttggctctacttttacaactgaatttattgctatcaaaatggatattttgatctgggttcttttaataggaggtttattgttttttctgactggcaggtatcctttgaaacagctgggaacaagcttccttggactgggcatcatcttcttttgcatcagcggattcagccatcttgccgggccgctgacaaagctgaaaacgggagccgacgttctataccatgttaacgattcaaactggtccgctttgctcatcgggatggtgttaactgccatcattcactccagttctgtctgtatcggcattttgatgagttttatgaatgaagggattatcggactgacacaggcgatgagcgtcgtactcggatcaaatatcgggacatgcattacagctgtcatggctgctgtatccgggggatatgcggcgaaacagacagcgtatgcgcatgtggtatttaacgtgctaggggtggctctagtattgccttttctgaccgcagcgaccggctttgtagagcagttatcacccgatcctgcccaaaggattgctcatttcagccttttatttaatgtggtgacagctcttttgtttcttccgcttacaaacttgttttaccgcttgattcactttcttatcccggctaaataaaaaaccggtacattttaatgcaccgattttttaggttaagaagacaaacgcatatgttcagttatttcatcctcaaccacacggacaaactgtccttcgttgtaaggataacctgcttttaggattttgacttttacgattttgccgatcatatcttccgtgcctttgaaaacaaccttcatataattgtctgtgtaaccgacaaacatgttctcttcttctgtttctttataggcttcctcaggaataatctcaagcacttcattttcatactgagaagcgtattcttttgcaagctggtcagaaagagcaatcaggcggtgcacacgttcgtttttcacgttttcatccacttggtcttccattcgcgcagctggtgttcctgtacgtttactgtaagggaaaacatgtagctcagagaatttatgttctttaataaagttataggtttccataaattcttcttctgtttctccagggaacccgacgatgacatcagaagtaacagctaagcctggcagtgcttttttcaatttatttaaacggtctgcaaagaattccattgtatacttgcgtctcatccgtttaagcactgtgtttgatccggattggataggaatatgcaaatgattcactatcttatctgagcggtctaagacctcgatcacttcgtcagtgatttggctggcttcgattgaagaaattctgatccgtttcacgccttccacacgggtgtctaattcgctcaaaagcttagcgaagttgtaatctttcatatcttcgccgtagccgcctgtatgaatacccgtaagaacaatttccttatatccggcatcaacaagctgctgcgcttgtttaatgacctcttcaggatcgcgggagcggagcaggcctctcgcccacggaatgatacagaatgtgcagaaattattgcagccctcctgtattttcaatgacgctcttgtgcggtccgtgaaagcaggcacatcaagctcttcatatactcttgctttcatgatgttgctgacgccattaatcggctggcgttcttctcggtattggtcaatgtagccaagcattttttcacggtcctgtgttccgactacaatgtcgacaccggggatcgccataatctcagcaggtgaggtttgcgcgtagcagcctgtgacacagatgacaccgtcaggattttgacgaatggcgcgtctgatcacttggcggctttttttatctcccgtatttgtaaccgtacatgtattaatgacatatacatcagctgtttgttcaaagtctcttctttcatagcccgcttctttgaaaagctgccagattgcttctgtttcataatggttgactttacagccaagcgtatggaaagcaacagttgccattactgatcacctcttaataactctgtttgataagaaatcgcgctcaacgcgtatagcggagcggtttctgtccttaaaattctcggtccaaggccgcacggcacaccgtcttgctctgtgagccgttcaacctccgcttctgttaaaccgccttcgggaccaaatacgatcaatagagatgatcccttcggaaggctgcttacaatcgcgctgaatgcgcttatttccccttgcttcgatgactcctcgtatgcaacgacacatttatcgaaatcctgcatcctttgaagaagctgctgaaaagaatggacatccatcactcgcggcacttcgttacggtacgattgctcagccgcttcctttgcaattttcgtccatctttcccgctttttctttgcctttttgtcatccagcttgacaacagaacgcgcggcttggaaaggaataaaggcatgagctccgagctcagtccccttttggataatccattcaagcttatctcctttcggaaggccgctcgcaatatagacctttatcggaagctctctgttttcattcgtccattctatcacaaggcaggacactttatctttggaaacagattgaagttcacattttgcctcgaagccgtcttgagagcagcagataatctgatctccctcattcattctcatcacgttcacaatatgatgaacatcttcgccggtaatcgaaaaagccggcgcttcctctatttgctgcttcgtgagctcgataaaatatcgttgcatacgctgtgacacctactaactgttattttttcgcaataatgctgacccaatcttccattgaaaggatttctacaatggtaaagccagcttgttccagtgcttcttttacttcttgttttttatgaccgatgattcctgacgtaataaagtggccgccttcttttaagaggctgtacgcttgtgaagtaaagcgaagaatgacttcagccaaaatgttggccacaatcacatcatgttccccttcaatcccgtctaacaaattgttttgcttcacttgagcaatatcgctgactttgttcagcttgagattaaggcgtgcactttctacagccacgggatcaagatcgtaggcatgaaccgattcagcctcaagcattgcagccgcaatacttaaaattcccgaaccagtgccgacatcaatcaccttatcacccttttgcacaaagcgttcaagcgcctgaatgcagagtacggttgtcggatgtgtccctgtgccgaaagccattcccgggtccatttcaataatcagttcatcagtatggaccggcgtatattcctcccacgtcggcacaattgtaaacttttcagaaattttcacaggatgataatactttttccaggcagtcgcccactcttcttcatttacttcagaaatagtgatgtggtttctgcccaaatcaatattgtaaagaaggagattattaatcgtttctttgatgccgtctacagtttcgcccagaaaactgttaaccggcagatatgctttgacaatgacaccctcatctgggtaatcattggggtcgagctggtagatttccccgtacacattctcacgttctttaattaaatcaagcgggtcctctatcacaaccccacttgcaccagcttcatgcaatatatttgagataggttcgaccgcttcatgtgttgtgtgaatgcttaattcggaccatttcaaaactaccaactcctcatccaataattaatcgcctttaaacgcccgttttaccttgtcaaagaaactcatttcctgttcgtcaggcaggtttccgctgacttcggcaaattcgcggataatgtctttttgtttatctgtcagatttgtcggcgtaacgacgcggacgacgatatgctggtcaccctgtccatagcctctgacattttgaacgcctttgcctcttaatctaaatttcgttcctgtttgtgtaccggccggaattttcaatttcacttttccatgcagcgtcggcacttctacctcatctccaagagcagcctgagcaaacgttaacggcatttcacagtaaatatcatcgccgtcacgctcgaagaactcgtgtgcgcgtacatggaacacgacaaataaatccccagcagggccgccgtttattcctggttcaccctgtcccgagagacgaagctgctgcccgtcatctacaccggctggaattgtcacattgattttcttgcgttttttgatttttcctttgccgccgcagtccgcacatttgtttttaatgattttgcctgtaccttcacagtggtggcagacccgtctgttaacgacttttccaaacggtgtattttgctccacgtttaactggccggagcctccgcagtgggagcatgtttctggatttgttccaggtttcgcacctgagcctttacatgtttcgcacgtttcctcgcggggaatttcgatggttgtttctttaccgaaagccgcatcctcaaacgacagggtcatcgtatactgtaaatcagcaccctggcgcggagcgtttggatctctccgtcttgtgcctccgccgaaaatacttgagaaaatatcatcgaaaccaaaaccgccgaaatcgccgccgccaaaacctccgccgccgaagccttggttagggtcagtgtgaccaaattgatcgtaatgcgcacgtttttggtcatctgacagcgtttcgtacgcttcttttacctctttaaatttttcatctgatccggcttctttgttaatatcaggatgatatttttttgacagcttccgataagcttttttaatttcatcctttgaagcgctcttacttactcccagcacttcatagtaatcacgcttactcatctcgcttcactctcccgaatttctcacataaattagattgtatcattttgaattatgatttttcaattccttttatcccgggcaagaaaaaaagtcaaagccaagagatgcctgactttgactttctaatcattgaatcagattatgaaatgtgttcttttcggtcagctccggaagcggggctgacactaaaaagaacttattttttgttttggtcgtcgtttacttcttcgtattcagcgtcgacaacgttgtcatccgctttgccttcagcgtttgctccgccttgagcttgctgtgctttagcagcttcttcataaagcttcatagaaagctcttgaacgattgtttgaagctcatcctttttcgctttgatctcttcaaattcgtttttctcaatcgctgcttttaaagcatctttggcatcgttggcttttttcacttgttcttcgtccactttgccttcaagatcttttaatgttttctcagtttggaaaacaagctgatctgcttcgttgcggacttcgatttcttcttttttcttcgcatcagcgtcagcattttcttccgcttcttttaccatgcgttcgatctcttcatcagagagacctgaagaagatttgattgtaatgttttgttcttttcctgtgcctaagtcttttgctcttacgtttacgataccgtttttgtcaatatcgaaagaaacttcgatttgaggcacgccgcgcggtgctggcgggatatcagtaagctggaagcggccgagtgttttgttgtcggcagacattgggcgctcaccttgaagaacatggatatcaacagctgtttggttatcagcagcagttgagaacacttgagatttgcttgtcgggatcgtcgtgttgcggtcgatcagttttgtaaacacaccgcccattgtttcgataccgagagaaagcggtgtaacgtcaagaagaacaacatcttttacgtcacctgtgataacgccgccctgaatcgcagcaccaagcgctacaacttcatccgggtttacgcctttatgcgcttcttttccagtttcttttttgattgcttcttgtacggcagggatacgagttgatccgccgacaaggatgactttgtcgatttcgcttgcagaaagtcctgcatcttgaagcgcttgacggacaggacccattgtgcgctctactaaatgagaagaaagctcttcgaatttagcgcgagttaatgtaagttcaaggtgaagcggtcctgcttctccagctgtgataaacggtaaagaaatttgcgtagaagatacgccggaaagatcttttttcgctttttcagctgcgtctttcaaacgctgaagcgccattttgtcttttgacaaatcaatgccgttttcttttttgaattcagacacaagatgatcgatgataacttggtcaaaatcgtccccacccagacggttgtcgccggcagttgaacgaacttcgaatacaccgtcgccaagctcaaggatggaaacgtcgaatgtaccgccgccaaggtcgtatactaggatcgtttgatcttcatctgttttatcaagtccgtatgcaagcgctgctgcagtcggctcgttgatgatacgttctacttcaagacctgcaattttaccagcgtcttttgttgcttgacgctcagcatcgttaaagtatgcaggaactgtgataactgcttttgatactgtttcgccaagatagctttcagcgtatgatttaaggtgttgaaggatgatagcagacacttcttgtggagtgtaatcctttccttcaatttcaactttataatcagtacccatatgacgtttgatagacataattgtgttagggtttgtaatagattggcgtttagccacttcccctacttgacgttcgccgtttttaaatgcaacaactgatggcgttgtgcggtttccttcagcgttagcaataactttaggctcgccgccttcaagcactgccacacatgagtttgttgttcctaagtcgattccgataactttactcacttgaataacctcctgctatgtaattattgattcactttgaccatggaagggcgaatgacgcgatccttcagcttatagcctttttgcatttcctcaacaacaatgttggagccgtagttttcgtcttcagcctgcataacagcttggtgcagattaggatcaaattcctgccctacagcttcgatggcttcgacgccttcttttttcaaggcttctacgagctgacggtggaccatttccattccctggagcaaacttttcgtctgttcattgtcggcttcaacctgaagcgctcgttcaaagctgtcaagagccggcagtaaatcagtcacgatattttgagaacggtatttttgggacgcttccatctctaaacggctgcgtcgtttatagttttcaaagtctgcttgaacacgcaaaagtttgttttctttttcctcaagcaaaccttgcaattcgttaatttggttttgaagaagttcgctttcatttgtttcttcctgctgttcatcagcggcagcttgttcttcaatgatttcttgctcttctgtttcgttttgttcaacggtttgtttttcttctgacattgtgttcacctccctcaaagtgtaaggagaaggacaggtgctgcccttcgataaaatttgccaaaattcccttattcatcatacagacttgttaatgcttttgacaagtccgaagtcacatgctgaagcaggctgacaaccctggaataattcatgcgggtcgggccgatgatcgcaattgagccgatctgcttctggtctacggaataagaagccgttatcagactgcaattttccatctcttcatagtcgttttcttttccgattttaatcgaaattcccgtgtgcggggattgaaccagctttaaaacatcctgttctttctcaattaatgaaaggagcgaccgaactctggtgatatcatggaactcaggctggttcagcatattgattttcccgccaaaaaacaacttttcaacgtgatttgtggaatgaaatgttgaacgaagcgcgtcgagtatattgtcatagtttttaatgtgctgtcttaggtacatgacaacttccttaaatatgcgctcattcagttcatccattggaacgccgcttaaacggtcgttcagtatatttaccagtttttcaatatcagacagatccattttggtcggaaagttaatcgttttgttttccacatgccccgtattggtaacgagaatcgctaccgccatatcaggctgaatcggaatgatttgaatctgtttaaggtaattctcactcaacttcggcccgagtacgatggatgtgtaattcgtcagatcggacaaaatttgcgctgatttttgaactgtcttctccagctcgaaaattttctctttgaagatcgagtggatttggtccaggtcgcttttcgtcaatttgacgggtgacagcaaatggtcaacatagtaccgataccctttttctgacggaacacgtcctgaggatgaatgggttttttcaataaagcccaattcctccaagtcagccatctcgtttcttattgttgcagagctaaatgtgatttcatcttttttcgaaagagttcttgatcccaccggctgtgccgatttaataaaatcgttgattataacctgaaggatcagcagctgacgatttgttaacatcatcatcacctctgttagcactctcaataagcgagtgctaattctataacaaaagtatcaaaccacaagaaaaatgtcaattataactcacccaaaaaagcgccaaaaacttcattgcctaataatttcccttgatgagtcaaataaacggcagactccgaattgtgaatcagccctttttcagcgaggtcttttaacacgcttgggaaaagtccatccagggaacggccgtatttttctgcgaatcgttttttgctgacaccggctgtttttctcaaacctaaaaacatttcttcctcaatctgttcttctgttgttacttcatgtgtatctctgtacggaaaacccttttcagctatcaggtcaatgtaatgcttaacaggtccgacgttcactgttcgtgtgccgccgatatatccgtgagcgccggctccgaaaccgaaatattgttcgttgctccaatacgttagattatgcttagattccatgcctgccttagcaaagttgctgatttcatattgatgaatgccgtgagcttccatctggctcatcaccatttcatacatttcagcttcctgctcctgcggcggaagatgaagccgccctttttgcatcaaattataaaataccgttttcggttctacaataagggagtaaacggaataatgctcggcatccagtgataaagcagtgtttatggaatgttccagatgcttgagggtttgccccggaagcccgaacatgagatcaagactgatattctcaaaaccgatttcccgcgctctttcaaaagaggtgaatacatctttttgcttgtgcactcggccgattttttctaacagatcgtcttcgaacgtttgcacaccaaagctgaggcgatttacgcctgcttcttttaatatttttaatttctctgcggacaagtcgtccggattcgcttcaaccgcaaattccgataagtcgcttgagggctttagcacgcggttgatcatatctatcagctttttaagctgttcctcagacagggaggtcggcgtgcctcctccgataaagattgttttaagatcaggctgcccggtttttgctattgtatttatcatttcctgttcgagtgcgtttaaatactcgtcgactggctgactttgaataaaatatttattgaaatcgcagtagtggcaaatatgctcacaaaatgggatatggatataagctgatttcaacggattcaccttctttacagaaagaagccgcagtacaagactgcggcggcttctattgttttttcggactgtcgtccattttcagaactgccataaatgcttcttgcggcacttcaactgagccgacctgcttcatacggcgttttccttctttttgtttttcaagaagtttccgtttacgcgagatgtcccctccgtaacatttagccaatacgtttttacgcattgcttttatggtggagcgggccacgattttctggccgattgcggcttgtaccggaacttcaaactgctggcgcggaatgagttctttcagtttttcaacgatcacttttccccgttcatatgcgtaatcacgatgcacgataaaggaaagggcatcgattttttcaccattcagcataatgtccattttcacaagcttggacggtttgtagccgatcagttcataatcaaaggacgcatagcctttagtgcttgatttcagctgatcaaaaaactcatatacgatttccgctaatggcatatcataaatgatgctgacacggtttgcgtctaaatactgcatatcaatgaaattgccgcgttttccttggcaaagctccattacagcgccgacatagtcattcggcaccatcatcgtcgcttttacgtatggctcctcaaccctttcgatcttttgaggatccggcatgttggacgggttgtcgacaacgaccttttcgccgtctgtcatatacacgtcatagataacgcttggcgctgtcgtaatcaggtcgatgttgaactcacgctcaattctctcctgaatgatctccatgtgaagcatgcctaaaaatccgcagcggaacccgaatccaagcgcttgcgaagtttccgcttcatattgaagggaggaatcattcagctcaagcttttcaagagcttcccttaaatcattatacttcgctgtatcaatcggatacaaaccacagtacaccatcgggtttagcttgcggtatcccggcagcgcttcttctgcaggattggcagcgctcgttattgtatcaccgacacgtgtgtcaccaacatttttgattgaggcagtcaggaagcctacatcaccgaccgtcagttcatttgtcggagttgctttcggcgtgaacacgcccacctctgttacttcgaattctttgccggttgccatcattttgattttttgtcccggctttaccgttccttcaacgactctgatataagccacgacaccgcggtaggcgtcataaagcgagtcgaagatcagcgctttgagcggcgcctccggatctccggtcggagctggcaccttttctacgatttgttctaaaatctcctcaataccgataccggcttttgctgaagcaagcacggcttctgatgcgtcaaggccgataacgtcttctacctcttggcgcacacgttcgggctcggcgctcggaaggtcgattttattgatgaccggaaggatttcaagatcgttgtcaagcgctaagtagacattggcgagcgtctgcgcttcaatcccctgggctgcatccacgacaagaatcgctccctcgcaggcagcaaggcttcgggatacttcatacgtgaagtcgacgtgtcccggcgtatcgattagatgaaagatatattcttctccgtcttttgctttatatttaagctgaacagagtttaatttaatggttatgccccgctcacgttcaagatccatagaatcgagcaattgttctttcatttctcgttgagtgattgccgacgttttttctaaaatacgatccgctaaggtcgattttccgtggtcaatatgggcaatgatagagaaattccgtattctcgattgcctctctaaacgcttttctttatctgtcacaatctatcactcctactattaaacgcaaaatacactagcttagattatatcaataggattgtaaagattcaatgtaaaacaagaaagagaaaagttccctatcatatctgggttgcttttctctttcacgtacttattgattcatatcccgtatccattcatacattgactgggcagtattggttacggtgtccgaaagcgcttttccggcttttgaaaacatattgaatgtctccaccttttccagctctttttgtttttcttctaaatcttttgccgtgactgtttctcctaggattgaggcttctttttcattatcttttccgtcggtgagcgtaaacgcccccttcagtgaagggtcatgatagcctttcatactcagcatcccgtggtttgcctgctgcatgccgaacagaacgcctaaaaacatgatcgtgacaagcagtaagcactttccaaagtatgcaatcaaatcaaccacctatttcttattgttttttcgtctccccgctcgctgcgttgaccttttcagcatcccagtacatttcgctgaatacgtccgcggccgcgttagccgcacgctgcagctcttcgagattattatccactccgccaaactcgagcaaaagcgctctatcggttaaatcctgattgtaaacaccattatcgcctggcgagcctttggaaaagacacctgtgctaagtccggggtattttttctccatcagtttatgaagctcactcgcaattttatagttttcttcgaagtttttgctttttttcccgacgacaaaggctaccctggcatagcttttccctttaatcgttgcggttgtgtcttttttgcgccgagagtctctgtggatgtcaatgatatattgcagatttttgtttgaagcgagggcgtctttcacgaccggccttgattcatcataggacctggcatagtttaagccttttttattcaattttgactgtatatcggttttattcactgtggctccgattccctgggattcaagcgcttgtccgaacatatctcctacaagcgtgacattggctttagaatggcgcgccatgtcaggatcggtctcgccttttaatagagggagatatgattccgtattgtgcgtgtgatagataaacacgacctttttatcacctgttgtttgtttcggcggatctttttgcgcattatctgattgcgtttgctgtttttcaatctctgccaaattcgcttctctttcttcctccatcaccttagacggcggcggcgattccgcaggcatattcgtataatccgttccttgtccagctaacaaaatctcggtatcaaattgtgcaaatcctggcagctcccgaccgagaaagctccgcggatcttcgaggttaatgctcgtcgccagctttaaagaaagacgagaaagatgaaatgagctgtctgtttgagagaggtcagaagcgaaataatggttttccatctgcagcaaatgtgcaaatacgtcacccggcaattcttcagcaatcccataaaaagagtcagacgacggcctaagttccggccggagagacgtcagcacaccggatagaacaaaaatcacgataaggcttacgataaatagaaagatggcttttaccgctttccctccatttaccgcaacaacaatctgtctgtttctgcgtttatttctcattgaatccctccagcgcttgtctagtaattactctatgaacaagctagaggaagtagaactgtttagtgattgtaggagcctttgttttcttgtgacactttttcatgaagcgctgtgtttaatccgttcgctaaaacatttgccatatcgtcgataaatgaatcgacttccttcggtgtaaccattaagttgtgccctaaaggcgaaagcacctcgtgaatgagctgccgtttttcatcttcttgaagggttccgacaatacctaggaacgattggcgctgcttttgatcgggaagatcgtcttcagtgagcactttctttttcccaaacgtcatgcctgccggaacaagcgatcttgatggcctgttatccttcatttctctgccaaaatgttttaatatgtagtccaccgtgtcgctggcaattgtcacggcatcaactactgtcggaacaccgatagcaatcaccggaacaccaagcgtgtctttgcttaaatcttttcgtttattccccactccagaccccgggtgaatgcctgtatccgatatttgaatggttgtgttgaccctttccaccgcccgcgccgccaacgcatcaatggcgatgacaaaatcaggcttcgattgctcaatcacacctttaataatgtcacttgtttcgattcctgttatccccattacacccggtgcaaaagcactgacaggcctgtaaccctcctgtacgttttccggctgaagcttaaacaagtgccttgttaccaacagattttctactgccatcggtccaagcgcatcaggtgtcacgttccagttgccgagcccaacgatcaaacagctcgcatcttttgagatattaaggttttcaagaaaagctgagaattcctccgcaaagacagcagagaccttctcttgcatttccgaatcattctccctgattccctgtgcttcaagcgttaaatagcgcccttctttttttcccgaaagctctgcgccttcctttgtaacatcaactgtgcggattttaatgccgccgtgatcacgctctttttcaataaagcctttaatttcttttgtcggcacagcctgctgattggccattgcttccttcgtttccactgccaaatcggtccgtatcaaatactgattcacatccagctcactctttttcatacaggggcctccttcacattaagtacctatattgttgccatttgctgaataaatcatgctaaaaagagaaccttcaatgaaaaatactttacatttatattgcaatctaaaggtgtgtttgatagaatacaatttgttctattgtgaagaagatttaaccttaagacactgtgctacaggttgtatcttaggaggtgaaacacatgccaaacattaaatcagcgattaaacgtacaaaaacaaacaacgaacgccgcgttcataacgcgacaatcaaatctgctatgcgtactgcaatcaaacaagttgaagcttctgttgccaacaacgaagttgacaaagcgaaaactgctcttactgaagcagctaaacgtattgataaagcagtgaaaacaggtcttgtacacaaaaataccgcagctcgatacaaatcaagactagcgaaaaaagtgaacggactttctgcataatataaaaacgatcctcaataatggggatcgtttttttcatttctttttaacagctgtaaaaggaacagttcgagcaggagctgcttgtcctttttcccggttttcatctcatagtccatgacggcaagctgttcaataattaaacggagctcctcctctgaaaaaagccttgcttgatccatcgccagctttacccgaaatgggtgaacttttagattagaagcgatttgtttttgtccgtatccctgttccgcgaagtacttcgtctgcagaatcagccggaactgattcgaaataagcgccataattttgatcggttcttcattttgttttagcaaatcataaaaaatttgcagactctctgttcgttttcggttgacgattttattgatcagctcaaaaatattttgttcaaggcttctagcaacaagcatttttacatcatccagcgtaatttcttcacgatctccaataaacgtgcagagcttttgaatctcctgaaaaatcgatgacagatgaccgttcacaagcagaaccaaatgctccgccgcttccgtgccgattgttttctgctctgtttttgcaaggttgacagtaaagtctgtcgtttcctttgcatttaattccttcgcctccatcataaacgcgtgcttctttaacgctttcgtcagcttttttcgctcatcaagcttttcatacggagcaagcaggacaaagactgtgtaaggcgcaggtgattgtatatatgattcaagcgcactgacgttgtgctcaattttttcttttttcttttcacctgttaaaaaatatggatttttcacaatgacaagacgccgctcccccataaacggaaacgtttcagcatctgcaatcgcttgatccagcgggtcctcttccagatcaaaaacggatagattgaaatcctttgtctcctgatcaacgaccgtctgtctgatcctgctgacggtttcttgcagcagatatgtctcttttccgtataaacaataaactggatggacatctccttttttcaggcttttccacacatcaaataccattgttgtacgacttcctctctttcatcatccccttctatcctaaattgagtttgcaaaatagtaaagaggaagcctgactgctgcttccccatttatattaaacgcctgttcgcaagcccccgggacagcttgtaaaaaggcgataatcaccagaacagaaaacgttaccttagcttctagatttttcaaaacaattccattatacttaagtcagtcaggagggataaagttgaatgattttgaaaaaaacgttcaaagcaaacgaaatgatgctgtagattcagctgttggttttgttgtgtccttcggatttttcgccttcttgtttgtcatggcaacggttattcacctagttggttcataacagcgactgcccgggctgctgatttctcggcagtcttttttagttcgtctctgttatatctgatgtatcatatggaggatagacagaaaaggttccaactctgtttttgtatctatattggatcgttccgttttgatctgttcgcagcacgcggatagaatgtctctgtaatagttgcagaacttcttgatgaggatgatggtaccgattgtttttcccggctgagataatggccgttttcggctgaagctgttggatgaattcttcaccggtagagcctttgctcccatggtgccccacctttaagacatctgctttaatatttggaaacacgtccatcacctcctgttccccttctttctccaggtcacccgtcaagatccagctcataccgcccgtctccatccacagaacgagagaggaattatttttgcttgccggatcaggtgctccaggtgacagtacatggaactgcaaatcctttatttgcaatacatctcctcgcttcacctcttcaattgtcactccctcttctctggctgtctgcagcactttctcatctttaggttcagaaacgaaccctttcggaatcacgaggcgctttactttatgatgcttcagcagagtctccgcctctccgatatgatcttggtcagcgtgcgtcagaattaaagcgtcaagctgtttgattcccttagcagttaaaaacggaatcagcaccttttcccccagtgaaaacggatgctgtttttcgcgccaaggctctgacgagtaagacaaagtgccgccggtatcaattaagacacgcccccgctgatgcggagcacctacaaacatgctgtcaccctgtccaatatctatcatatccacttctccttcggaactaagacacggatatataaagagcagaaacagcaccgtgcagcaaatgcctccggttaccatcaactgcgacaaggagcgtttttcaatcgccataagcaataggatgatcgtgaccgtgaataaaaaaagcaaaacaggtgcaggatgtgcgatcataatcgtgaacacatcaacatctgcaatgtttgtgattagcctattggtccagcttatcaataaatcaaaccagctgaaaaacaatctcccaaacgaagcggaaagacttaatagaagaacacctgctacagctcccggcaaaatacagaaggtataaaatggtaccatcaacatattcatcggtacgctgatgatagaaaactgatgaaaatgatatagaagaatcggaagcgagcccagctgagcgatgagtgatacaattgtcagctgtcccaaggaggttttaacctgctgaaaaatagaagaggatagaattaaagaaaaactgacggcgaacgatagctgaaaaccggcttcaaagagatgataaggattgaagagcagaaggacgatgtatgaaaggcaaattgcagttgcagagtggacacgccatttgacaaggcttccagctaagtaaacacccgacatgagagcggcgcgtagcactgaaggagcagcgccggtcaacatcacatagagcggcagaaataacagcaacagaattgacgccttttctctagttataccaaggcgaatcatgatataaaacaaacctgctgtcaaaatccccacgtggagtcctgatattgccaagagatggacaacaccaagcttttgatacgcggtaagcacttcatcctccacataaaatctgtcaccaactgtaagtgcctgtacaatccctgctgaatcaggaggcaaaaggctgtttgtgaatgatatgatatgttttctcaagctgagcaccttgtacttaaaattttcaggttcgctgcagttttggatagacgtgacagagtagttccaatgaatatgctgccgataaagatactcgttataatcaaatgcacccggcacagttgcgtgattcggttcttccaatgtaccagtcaactcacatgacattcctggttctatgtataacagctgttctttttcaccagcagactgaatgcgatacgcagcagcccatttttccttatcaggtgtctcaaccatcatagacatacggtcgccgtcaattttgggaatagtgtcaatcactgccttgaattgataggttccctgccgataggaagagacattctgagaatctgtgactgcatacagtacaaaaaacaatataaaagagaagaaacaaacaataatgagaaaagcgtgcctcgttttgattaaaatgatgaggagaaagaggatgaaaagaaaaatagcggggaaataagcggcggcagtaattccaaccgttgccgaagctgccgccataggcaataacaaacgcgaattacgcattcatcacacgtagctcgtgaaaagtgtattcgcctgttcatgtatctttttcaattcttcctccgctaaaccggcatcggccaatttccctattagacccgctacaaatgaaagcttttccctgtttttcagatcaacgatcatttcatcgagttcaacctgttcaactgttacacccgcctgttcaaataattcctgcgcatacggatgtgttttgtaatcctcagcataataaaccgttttgataccagcttgaataatagatttgcagcattgaatgcacggataatgcgtcacataaatctcggctccatcagtcggcaccccaaacttagagcattgaagaatcgcattcatttcagcgtgaatcgttcttgcgcaatgatcatctatcattaagcatccttcatctgcacaatgtacaccgcccgcgattgacccgttgtagcctcctgctatcatgcgtttgtctctgactatagtagcgccgacagataatctcggacatgtgctgcgcagcgccaataaatggctttgagccataaaatattgattccatgaaattcgttccacgttgttccctccaaatgttgtgttgcctgacctttagtttacctatcataatgcatgaccgtcaaatcactttactgtaatggaagactttattttctcaaatgacttttcacctattcctgaaaccttagtgatatcttcaattgtttggaaacgcccgttttcttcccggtatgcaataatagcttcagctttggatggccccacccctgagatgccttgtaactcctctaaggttgctgtattgatattcaccagcggccccttccctccatcgctttggacagaccctccggtaccttgctgcactgctgtttcctctccctttttcgggatgtacaccactgtcccgtcctgaagaacctcggccaaatttacttgcgcttcgtctgcttgtttactggtcccgcctgctttctcaattgcctgagatactctgtcccctgttcgcatttcataaacgccaggatgctgaacagcacctttgatgtctatcacaattgtttcgcttgactcgtcgttgtttgcttcctgctttaccactgtattttctgtctctgttggtacagcttgcttcaccggctctttatttttccctgtggccagaaagatcataatagctgtgaaaacagccgcagaagccgctaaaataattgttttcttatgctgattcaaccaattcatcgtgcatgttccccgctttcgtcatattttattttcataacacatatggtttagaggataatagctcaaaggaggggaaaccattgaagataggctttatcggcacaggaaatatgggtacgatccttatcgaatcatttattgaatcaaaagcggccgatccctcaaacataacaatcacaaaccgcacaattgaaaaagcgttgcacataaaaaaccgctacaacagcatcaacgttaccgaaagtctcgaaaagctcgtttctgagaacgagatgatttttatttgtgttaagccgcttgatatatatcctttactggcaagagcgttaccttatttaagaaaagatcatattctcatttcaattacaagccccgttcaaaccgaacagctcgaacaatatgtgccgtgtcaagtggcgcgagtgatcccaagtattacgaacagagcgctggcaggtgtttctctcgtcactttcggcacaagctgcgacgaatctgcaaaaacgaaaatcaatgagctaatgcagcatatctctcatccgctgcaaattgaaagtgacatcacaagggttgcatcagacatcgtaagctgcggccccgcttttatgagctatctgattcagcggtttatagatgcagctgtcacggaaacatcagtatctaaacaggacgcgattttgatgtgtaaggaaatgcttgtcggaatgggaaaactgttagaaaccgaattgtataccttgcctgcattacaggaaaaggtttgcgttaaaggcggtgtaacaggagaaggcattaaagcgctggaaagcggtgtgcagaatatgtttcaccgggtatttcaaaatactcatatgaagtacgaggaggatatttccgcagtgaaaaagcagtttcatgtgtagacgagtatgtcatactttcgtctgtactgcaaaagcataaaaaagcattttaaaaaaccatcgttttaagaaacgatggtttttgatttctgcgccttgaaaaagaggcgttctgattgtgctgatggctcggtatccgtaaaatcagctgtcacgcgatggagctgaaagccgcagttcttaagcatttcttcgtattcttccaccgggaacgttctttgctcgtgtgtctcatcaaaacgatcatacgcttctccgttccacacaaaaaacgacatatcatgaatgacagaaagctcgtcacttccggcaaagctctgccaaatatagctgatatcttcgtcctggtcagcaaatgtgctatccggaaagacttccgcaattttataagatgaatgaacatcaaacagcaaaatgccttcaggctttaatacccgaaatacacttttaaaggtttcgatcacatcattttttgtttttaaataatttaatgagtcacagcatatcacaacagcgtcaaattgaccgtcaaagccggtaatctctctcatatcctgctgaagaaataaaataggctggctactcgataccttttgctgggcgaaagaaagcatctcttcgctgagatcgatgcctgtaacctcgaagcctttttcggcaagccggatggagatttcccccgtgccgcatgccagatcgagaatacggcctttttccgggagagatgcttcaatccattttgtccattgatcgtaaggcgcgtgtgacattaactcgtcatacacgcttgcaaagccctgataaatcattgattcattccaaagtcaagatctgcgagcggagcgtctccccacagcttttcaaggttgtagtagcttctttcatccttgtggaagacatggacaattacatcgcctagatcaacgagaacccatcttgcttcatcaaagccttccatctttttgacttgaatgccgttttcatcagcttgatccttgatttcacgggcaatagcctgtacctgtttatctgaatttccgtggcagatcagaaaataatcagcaaccagagaaataccttccatatccagtgctaaaatatcctctgcccgtttatcatcgcaagccgcagctgcgatctttaaaatggacttttggttcattcacaaattcctcctgttcagctgccagacacaagccagttatacgttaaaaatgtgtctggaaaaaccggttgattttttttcataagaaaaaccattgtatttttaatggactgaatcagcgcttgattcaaatctgtctcagcaagcttacgcacctcatcgacaccgggaaatgcccggtttggctcaatgtaatcggcaacgtaaatgactttttctaaaagtgtcatgccggggcgccctgaggtatgatacctaatggcgtcaagaatgtcttcatcttgaacccctgcctctctttggaccaaataagcgccgaccggagcgtgccagagctccggattatgatccaataaatgcgcaggcattttttcacgcgcaataatttgtttcatttcttctttcgggcggaatttggcgtaatcatgaaagattgccgctgtttccgcttttttagaatcggctccaaaacgctccgcaagttcgatcgccgtgttcatcacgccaaccgtatggatatatcggtgttcggtcaattgctgcttcacgcatgcaagtgcctcctcacgattcatataaaccattctcctctacatacttcttcactttatcagggattaagtagtcagtgggcttcttgcttttaaaccgttcccttatcatagttgatgatacctcaaattccggaacgtctgcaaagagaagcggataaggggtttcaacatgaaaaccggggcgctttactccaataaattgaatgaggttcagcagctcgtccagcttataccatttcggcaaatattcaatcatatcagcgccgataataaagaacagctgatcatttggataacgctgcttcagtaaagaaacggtatcaaaggtatatgatggcccttctctttccatttcaacaagctccagcttaaaggacggattagattgaattgcaagctttagcatttccacgcgatgaaagctgtcggtatagtcttcgttctgtttatgcggcggaatttgattaggcataaaccaaatttcatcaagccccgcctggtacagcacctcattcgccattaagaggtgaccattatgcggagggtcaaacgtgcctccgaaaattccgattttcttcatttcaaccacctttaaggaagctcgatttgtttattttcctttgattccttatataacacaatcgtattgccgattgtctgcaccaattgagagcggcttccttttacaagagcttccgctacatcgtttttatcctcttcgcaattctgaagcacgctgactttaatcagctctctcgcttcaagcgcctcagtaatttgtttaatcatgttgtcgtttactccgcctttacctacttgaaaaatcggcgttaaatgatgcgcttttgaacgcaaaaaacgtttttgtttacctgttaacattctgttcctcctaattttcctattacaatagatctcattttttcaatatcaggctcttgtccagtccacaattggaaagacaatgctgcctgttcaacaaacatgcccacaccatcgagtgttttcaagcctttttggcttgcttcttttaaaagggccgtctgtattggattatacacgatatcacatacgacggcactgctcgcggcacgctgtaatgaaagcggcacatcgtccacgttcggatacatgcccacagacgttgtatggatgataacatcatactgctcaagacgttcttctgcttcttttatgcttaatacttctttattgtgaaacgagggagtagcttctgtaagccgctttgctttttctaacgtccggttgcaaatgtcaaattttttcggggtatttcggacaattgttgtaaaaatggctctcgccgctccgccagcgccgatcattaagaatgacagttcagagatgggcttgtctaataccttcattaatgacttcacgaagccttccccatcggtattgtatccgacaagcttatctccctctcttctgaccgtgtttacggcaccgagcacttttgcactctcatcaatatgatccagataatccataatggaaaccttgtgcggaacagtcacattgattccttgtacgcctagagctcttattccttttaccgcatcctccagatcattctcttctaccttgaaggcatgataatgtccgtcaagcccgaggtctttcaatgatgcgttatgaatatcaggtgacatagaatggccaatcggatttccgataaccccgtacagctttttcatactcctctccccttttcttaaattaatgaacgccgaacaaatacatgaacgccttttggcgcgtatgcagttacctttttatcggcgtcatggacagtaacccagcctaacccagagaaaacgatatctgtctttttgtcttttatcgtaaacgtatgggcgaccaattccggaaactcatccatttcatctttacccggaggtgtgagcaattcccctgcatgcttttcataaagcgcgtctgcattttcaagttttgttctatgaatcatcagttcattcggcatatagcaaataaaaggagatctttccccagacacataatcaaaccttgcaagtccgccaaaatacagtgtttgctgatcattaagctggaatgtgcgaggcttcagctcctttttaggagataatattttcagatcctttttattgacataatgcgccatttgatggttgttgataattcccggtgtatcataaagcgatgaaccgtcatccagcgggatttcaatcgcatcaagggttgtgccaggaaattgggatgttgtaataatatcttcttcacctgacacttctttaataatccggttaataaaggttgactttcctacatttgtacatccgacaacatagacgtcttttccgttgcggtaatgctcaatcgcgtcaattacttctctgattccctggccgcgtcccgcactgaccaaaaatacgtcaaccggttttaagccaagctctttcgcttcacgcttcatccattggatcagacgctctcttttcagtgacttaggcaaaatatccgctttattgccaactaataagatagggtttccccccaccaagcgctgcagcccattaatccagctgccgttaaaatcaaaaatatcaacaatttttacgacaagagagtccgtttctccaataccgtgaagaatgttcaaaaaatcatcatcagttaaggagacatcttgtatttcattatagtttttcagtctgaagcaacgctggcaaatcacattttctttcgtaagcgatgcaggcggcgcgtaccccaaacctgttttgtcctcggtttggatcgtaactccgcacccgatacaaacaaccttttccatttcttactcctcccactgaatgtgcccttttcgtttgagagcactcagtattctgcgttcgacctggcggttaaagcgcgtaatgaatccgtcagaggaagcgactggcacgaccaaaatcgtatggtagccgtttcggtttcccccgagtacatcggtcagcagctggtctccgatgacaacgcagtcctcttttttcagctccatattgcgcaccgctctattaaaggctttacccatcggttttcttgctttatagatgaatgggattccaagcggttctgagaaaagtttcactcttctttcgttattattagagacaattgtcactttaatgccgtgttccttcatttcttcaaaccactcgatcaatcgcggcgtcgcgttcggcctgtcccattcaacaagcgtattatccaggtcagtaataatcccttttacatttcgttcctttaatttctcaggtgtaatatgaaaaatattttttacaaactcgtcaggtaaaaaaaacttttttaacaaaacccgcacccttccctttttctttctttcaaaatgattgtcgaaaaaaatcgaacttgcgcctaaagaaaaactgagcaaaaaaatttcgacaaaaattgggtttcttcaccaggtgtggataaatttacacacactatccactcttattacatcactctttagacaaattataaacacgatactcacaagttatccactttttggtgtggataacagaacgattgttcttatatgcatttcatggtagattaaagataacttcaacctcagatgaacgcaacttatcattgtatgcgttaaaatcatgaatgattccaacttttaaggaggtgcctctcccattaattgggttcctagcatgagaaaactgtctgatgaattactaatagaatcttatttcaaagccaccgaaatgaatttaaaccgtgactttatcgagttaattgaaaacgaaataaaaagaagatcgctcggacatattatttccgtatcttcttaataggaatttgtctattttttccgggcgtatttcctttttttactcagatgactgatattatatcactttggctgcgcgctttactactattttcagcaaaaaacacccctaaaaagaggtgttttaaagggccggttattatgctaaccagtatatgccgcccacaacaaggagaacaacaactaaaacaacaataaaagcgtatccatatgctctgcctgcgccatacatgtgaagcgcctccttaataaggttttataacagcctatgtaggagaaataaatcggactaggcggttgtccggctcaacgctgcaggatctgcccatcttgtattccttcatatacgatccttgcccctttaggtgtcatatgatttccagaaggatctataagaccagattggataagcgcttcatcagttgcttttccgccgtctgcttctataaaatgcttccagttatctacaagagggacatccaggcgcttcgacacatctcttgtaatatcgttatatgagttgtgccatttccttgctccgccttttggttcaaaagcagctgcttgatatctggaatagtaaaacaaatgatgcttcccattaccttctataattgggatacacgtcattaagattggcttgatcccgtgttttctgctttcttcaataaaataaaccagattttctctaaaacgctgcttcgacactctcggtttcccctcagtcagtatggcagcgtcattggtgccgaacataataaacaaatacttcggtttttgatccagcacatctgtctgaaatcggagacgggcatcctctgtcgtctgtccgccgattcccgcattgagtatatcaaggttaccgcgctcagctgtttttaatatattgacccactgctgtgcttttggataatcgcgataatcccaattagagccacgcgtattgctgtcaccaaatgctacaacgtcttcgtatccccttccctcgcatcctgctgtaacgaacagcagaaggaaaaggatgataaaatgtttcatctttacacccccaaaagcctcaccttaatgttatacctctgtttctcttcgttcaatgaagagtttttcgctatcactgttttttcctatagttaacgtgtccccctcagtgaatatcattctgctttcattgcggcgcagctgatgattttttaaaattcccttctttccaatctgaaaaacacacaaaccaaagaaaagaaaataacctaaatccgcactggaaacaggttatccgttaaatcctgcatttactttaacttcgatttaagcttggcctttgtttttggcccataaatcccgtctgcagttaatccgttcatgagctgaaaacgcttgacggcattcgctgttttcggtccgtaaactccatctatgccattgtttttggctcccttatcagggtaaaagtgaagtgcagttaaagccttttgcagctggagaatgtttgtgccctttcgataaggcgaagtgagctttataaccccagacggcagaggatatgatggtaaaggttcttttggaggtgtatccgaggaagaaattccgtttataaaagagttccagtggttcaagagtttccgcggacattctttcccagaccattttttgtggggaacaacacgatgtaacggaatattgttttccttcatcagctttctgatcagccactgggcatttgatgttgctttttcaaaatcgccatcagcattttcgcagatttcaatcccgatcgatttgcggtttcctgtcccgtttgtaccgtctcccgcatgccagccgttttcatctatcgggagatgctgataaatgactgaatcgtcaactgtaaaatgccagctttcggatgtgctcgggttttttacaaaattggcgtgcattttcgcatcagcgccttttgctgtattcgctgtattatgcaccgtaatataagcaggcgtcatcgcatagccaggacgattatcatttgataccggtataaaatccttttttatggttaccatttctatccctccctattattaagaatgcagaaaacagagagatggacagccttttttatgaggtaaaaaagaattgtgttctcaacctggttttcagttgaaccgctgaaatggcaccagttatactaatttagatgacggaggttttggctcctgacatcacctaagttgggagtgaccatagacatgttaaaaaaagtaataggtatacttgtgattatcgctatcattgcagtcggtttttttcagaaagaagcttggcttgatgcaatcaaagcaggagggatgttttccgttttatttagtatgctgctgattgctgccgatgtttttttcccaatagtgccgtttgctttggttgctgctttaaatggcgcagtgttcgggactgcaaatggaatttggattacactgaccggctcaatgcttggtacaatattgctgttttttctcgccaggtacagttttagagattgggccagaaaaaaagttcaggcctatcctgccatacaaagctacgaggcttccttcaacaaaaacgcttttaccgctgttttattaggaaggctgatacctgtcataccttcacttgtaatgaacgtgatctgcgggctgagccaggttcgctggcatgtttttttctttgcgtctttaatagggaaaatccccaatattgttgttgtcactattgcaggtgccaatttcaccagcaataaattattgtctatcagcatttacggtgcatatattctgatcatcatgctggtcatttataaaaagttccctcatcttctgaaggtgccaaaaaaataaggaggcttgttggcccccttactttttttctgtcgcatggcctccaaattcatttcgaagcgcagcgaccacctttcctgtaaacgtatcgtctgttaaagaacggtatctcatcatcagtgacatggcgatgaccggagttgccgtctgcagatcaagcgcggtttccaccgtccattttccttcacctgaggaatgcataatgcccttgatctgatccagtttcgcatccttagcgaaagctcgctcagtcagtcccataagccaagaacgaatgacagaaccatgattccacactctggcaaccttctcgtagtcaaaatcaaattggctgttttcaagcacttcgaatccttcaccaatcgcggccatcattccatactcaattccattatggatcatttttaaaaaatgtccgcttcccgcttcaccagcgtatagataaccattttcgacggcagtatcacgaaaaagcggttccacaatctcccatgcttcatgatcgcccccaccataaaacaggctccatgccgtgcgccttccattccgcccgacgttccggcatcgagataatggatacccgcttctttcatttgattgtagcggcgaattgattctttataatgagagtttccagcttcgataatcatatcgcctttacttaataaaggtgatacatcacgcaaaacagcatcgacaatgccatgcggtaccataacccataggatacgcggcgggtctaataaagaaattaactctttaagattcgttgtcccctcagccccgtatgctttcagttcatcaacagccgcttgatttacatcatatccaaccgcttgatgattgcggtcaatgaattgctttcctatgtttatgcccattttccctaagccgattaatccaattttcatatctgttcctcctgattgtctaaaaagcctttactctttatgttccctttggattgtattgtgatacgcagaaaacaaatggggcttacatcgtctgcgcatgtaaattttatttttcatgactgactgtgcctgccagttctattactgaatctctttatatccataattatcactttatccttgatttaccatcagtttaagttaaaatatgggaaggtattcgatttttttagtaaaaagaaggtgacatgttgcagaatcaatctcatactcttatcggagttacgaaaaccgctgtattctttttatacgctgcacttgcaatcatcggttttgcaatcgggtattttattccgcagattgcgaaatgggcattatccctcccctggatccctcttgaaggaccacttcggctcattacctcttttcagggatctacagcttcatttatcactgctcttctcggtatgtgtgcggggatttggttcgctcattctgttattgcaatgctgctgtctgtcaaaattacagatcacacagtggaattcatcaaaggaaaaaaagtgcaaacaattcattccgatgacatcgctcttgtatttatggatcacaaacggcttgtcctcctgggaacagccggatatgaattggtacgggaagaaattgatgaaaaaccagtaaacgttgagaaggcctttagacagcatcattacgaatgggcaacagatggtgatccgtttaaagatcaatttcgccgatggattcctgatgcaccagacctatcgcaaggcgcccatgccttattaaaagctcgtcacaaagcactgcaggacgaagaaaaagacgatattgaagaattccgtctcgaactggcacagctgggcatcgttgtacgggacgaaggcacacgccaatattggcgaaaagcagaaacctatcccccgaaaattcagctcggcgaaggattgtaacaacagaggctcaagaaagagcctcttctttattactgcacaataaacagcactctggtgccgtcagggtagctgctcatttgattccctacccacgagccggcgccgcgattatcagaaggcgtcacatatcggacatcagcccctgcaccgccttcctcgcagaccgccatcggccactcatcccggtcatagcccggcttggtcgggattccctttaaagattcctcccgccttttgtctgctccatctctgtcaatggtacaaatatctggatgtccctctgcaatcgcatccctaatatgactgccggtttccggataacgagacagcggaaaatataacactttgtcatacgaagatgcgccttggatctgttgcggaaccattaaacaaagaagaactgctgcagcaagaaacaggcctgccatccattttttcattcccatccccccatacctttgttcatttcaatgtatgggcgcttgatgaagaatatttttaacatttgaagttagtatgctgcttaccaaagccggactcccccgcgagaaatttcccggtacagacacagacagcctcccggtcacatacatttacatataggcttttgcctacatacttttgtggaggtgacgatggtgacaggtgttttcgcagcgctcggctttgttgttaaagagcttgtctttttagtatcttacgtgaaaaacaatgcctttccacaaccgctctcaagcagcgaagaaaaaaaatacttagagctcatggctaaaggggatgaacatgccagaaacatgctgattgagcataatcttcgcttggtcgcccatattgtgaaaaaatttgaaaatacaggtgaggatgcagaggacttaatctccatcggaacgatcgggctgataaaaggaattgaaagctattccgctggtaaagggacaaagctggcgacgtatgctgcgaggtgtattgaaaatgagattgtaattacaaaagggggtgcatactcctctttaatacgtttaaatatattcggtgatctcttctcctctcttggtttattattgaaacggaaacaaaaatccattacactattgctgatgcaccaacgggtgggaggactcgccatgaacaaaaaagaactgctcctaatgaatttcaaggacttgtttaacaagatggcttggcttaataagccaaagatggaagtctgtcttaaagggtataagccttctgaagtacattgtatagaatccattgaacatggaaatactaatgtgacaaaactagctgagtccctttatatgacgagggggccataagtaaaatgactaaaaagcttatagaaaaaggcttaattgaaagctaccagaagccagataacaagaaagaaattcattttaggcttaccgagcaagggaaaaaaatttataaaatccatgatgaactgcacaaagagtttctagagcgcgacaaggcagtatttgaacaagtaaccgaggaacaatttgactttatgattaactttgcggaaaagtataatagacatttggatgtagaaataaaaaaacaaggttttgatattaagtcggaataaatttaaataatgaaaatgcaaccacaggcagccaactctattgagtttcggctgcctttttattaccgtcattttgttgacgaggaaacaaaattatgttattttttgttgactgggaaacaaaaaatacaacttttgagaggtgaataatatgttaaaagacaaagtaaaggagccaggattaccaaaagaaatcctcatggcttcctgggccattgcacttggagcaattgccccaatgcttgactcaactatggtgaacattgccatcgacaaattaaataaggatttcagtacgacgttggataccattcaatggtccattacaggttatgttttagctcttgctattgcagttccagtatccggatggcttatgaacaaatttaatggaaagaaaatcttaatcggcgcagtcattgcctttggtgtaacttctgtttttgctggaattagttgggatgtttctagctttatcttattccgtttgcttcaaggatttagcgctgggattattactccgctcatgtcaacactcttggttaaaacagcaggtccagagaatataggaaaagttatggctatcgtcagcacacctatgattttgggcccaatcttaggacctgtaatcgggggcttcatcgttcaagctacatcatggcattggattttcttcatcaacgtgttcatcgttttgattgctgcaccactgatgatgaaaactcttccagactttgagccattcaacaaaaatagtaaacttgatatttttggaattatcaatctatccttaatgagtgcagcaatgatatacggaattacaaaagcagcagaccatgcatcatttaacaatagcgaaacaatcctatgggtgggcatcggcctctctttagctgtaatttacatcgtatataatcgaatcagaaaaaatcaaaccgtactccctttaaatttgtttgcacacaagaacttcttagcatccagcgtcgggttattattagcgaatattgccgtcatgggacccatgttaatacttccattgttctttcaaaacttccgtcatttcacggcaatcgaagctgcgcttgcattaatccctcaaggagttgggatgctcgttactcggccaatgattggaaaaatgattgataagatcggtgcaaaatacgtggttattgtcagtctcgtcctttcgcttatcggatctattccgcttatctttatcaccgataaaacaagtatgatttggatttctatcatattattcatccgcgggaccagttttggaggaattatgcttccgttaacaagtgatgcttatacaggacttgacagcaaacaacttccagaagcaggtgtcggtattaatattattgaaaacctcggtgcaagttttggttcagctgttatcgcaactgttgtcgcaactactatacaaggattgcaaccaacgattgcgaatggcttaaaaggttaccatgccggattcttagtatccaccattgtccttgcggtaatcttcatcccaagtctatttctcacacataaaaagaatgcacaataaagaaatctgcatactcgactgccgaacggtttgtttggataacttgtgatacatgtgatgtgcaccagtttcataagcccatttagaaaggcgcttactaatttgattggctatctgttttcttcgatgtctggatctacttcagaggtttcaattacaaaaagagggcaataaccctctttaatacgtttcaatatatatagtgtcagaatccacaacggtaacttctttcacgataaagttaacaattgtttttttatcatcaagggttaagttatctgcaccgattgattgaaaatagtcgatggctctttttagagcattttcacttgagctcgtatcatccaggactttcatttttgattgaatttcgctacacttttcagtaagctggttttgctttttttgcagctcaataatttgcgctttgatttcatctatgtctaaatcatcgtcatcgcttaggctgattagcgttaaaagacgcttgcggcctttttttgttttctctatctctttttgaataagttctaattcatcagacaggtgatttgattgttcaatctctttgaaagaagcatacttttgaggatttgtgatgaatttaaaaatttcaccccatacatgccggttcaatttattctcagacatttcctttccgcagccgcggtcctttgcgccagaataatttttccggcaagtatatacatagtagtctttaccatgtgattttcttttcttccctgtcatggtatttccgcatttcccgcatctaaccaaacccgataacaagtaattgtgagggctaatgcttaagtgttttcttttactttgacctaagagttcttgagcataatcccattgttcagctggaacaattgctggaattgccacagtgatttgctcctcttcaggccttattttgattatagatttgttccctgcctgttttgaaacataggaaccctctgtatcatatttatactgtttatgttcacccttataagaagagttcattaatatctgtcgaacaacctgcctgtgccatactttggcacctttttttgttttaacccccatctgagttaaatgtagagcaataccatttactctgccgaaaaaagggcttttatgatcggtgaaatagttaaaaatcatcctaatgatttttgcttcctcttcaaaaatctcaagagttcttttctctttaacaaatttatagccatatagtttggaatctttaataatcatgccttttttcattttttgaagtcggccgcttgatgtccgttctttgattttggctttttcaaattctgagattgctccacgcattgcgaaaaataattgaccttctggagaattggcgtattcaccatttacaaataccaagggtatatttcgctttcgcaattcgtcatcaatgataagctgattcattaatttccgagaaagacggtcaggatcataacaaatgacttgacttataagtcccttgcttgcatcctccctcaagcgattcaaagccggacgttctaaaagctccccagaaaatccttcatcggcatacttcagcacatccttagtccctgctttctttatacaggcctcgatctggctgtcgatgctcgatcccttgatcgcttgttcctcggtcgatacccttacatatattgctatcaccctggatctccttcctataaagttttattaaataatgatagcaatcgttaatgcatttgtcagcttgcggtccctcgatgattatcaccttcataaaatgcatcaccccttgggtaatgctatgtaaaggcggtttgtcctaatgaaatcattttcaatgagtgtgaaaaaagcacttaaaaaaccgatagttaaaacgatcggtttttcgacatcgcctaggccctcaacatagtaaattcatatcattagttatgaaagcttattttcactacactccttatatttaattgccatcatttctatacgatttatatgaaatatggtaaaaaatggttagctaaaacgataaagataccaacctgttcatttggtatccccattcttcaagtacctcaataaatgtaaaccactgaatatttttatgacattgcacgtgtcaatgatgccaattcatgaactcataaaggagatttaataaaactcccaaaacaaaagggatatcaatatagttggtatcttctttattagtttgaatccctcaataaagtggatgcttatcataattacaaaaaactttatttgaagcactgaagtcattcattatattgttgtaaagataacactatagtccccttcttacttcataaacggttgttatatttaacttcttaattaagggacattttctgtttttagattcgttatgtctttttctgttacgtaaagaatggagataaaccaatagaattaagtgagctttaaatgcttcaaaaagctctgataacaaatctctttataatattcatgtgaatttatatcttcactcattagccattgaatgagcaatccatctacaatagatcgcattgtttttgaagctttttcaacatctatactttggtcaaatacgcctgtttcctgtccgaaaataataatgttagatgtggtgccccagcactgttgataaaagctatggttaattttcctgtacgtttcatttcgggttgcctgagacaagaaatctaaataaaccttataaaacttttcattttcctcgggagagacaaatattgaatttacataagctttcaacttatctagtggcgtagattccgaatccactgcttccaattcatgtttataaattttatttgtaagccactcaagtagttgagaaagggtatcttccttattatcaaagtaataatgcacgacgcccttactaactcctgcgtgatctgcaatactttgtagtgtaactgaattataaccttgtgttgacacagcttggaaagctgcccttaatatctgattctttctttcttctgcttttttcttcataataaacctccagaaagctaaaccttcaattagtatacaacagttcatgaaatccacacaaaattattccgaccagacaaaatagtttgaccggtcagaataatttagtatactaaaagtggtttcacatcaagatagcatataggaggatttataaaatgaaagacgaattcaaggctctagttgtaaacaaagttgatgatgaattttcaattaaagtaaagaatgtttctccagcgtttttaccagaaagtgatgtccacatccaagtacactactctggaattaactacaaagatggacttgcagggaaccccaatgggaaaatcgtaagaaaatacccatttataccgggtatagatttagcaggtgtagtcatttcttctaatgatcctcgctttaaagagggggataaggtgattgccacaagttatgatataggtgtttctcattttggcggttttagcgaatatgcaagtctccctggagactggattgtacctttacctgataatttgaccctcaaagaagcaatgatagtaggaacagctggcttcacagcggcactatctattcaacgtctagaagaaaataacctatctcccgaaaaaggaaaagttctggtaacaggagcaacaggtggcgttggtagttttgctgtttcattccttaactctctcggttatcaagtagaagctagtacaggtaaagaatcagaatatgattacttacgaaaacttggagctagtacaattatttcacgggatatgacctatggagggaaggttaaagccttaggatcacaaaaatgggcggcagctgttgatcctgtaggcggggaacctcttgcctctatcttaagccaaattcaatatggaggttccgttgctgttagtggattaacagctggaacaaaactgccaactactgtttttccattcatcttaagaggtgttaatttacttggaattgattctgtatattgtccaatggaaacacggttaaaaacatgggatcgtgtagcaacagattttaaaccatctaatttaaaggaatttatatcacaagaaattactttagatcaacttcctaacgttcttcctgaaatattggaaggacaagtaagagggagaacgattgtaaatatcgtatgattattcatcagaactcatccagttgctaaagatgaaacaatgtcttaaaggtctagtaaagggattctcaacaggaattcctttacttattatagcttactttatgttaatgcaaaaatataaggagtgatcctccccattcagcttacacagtcttaatgatatgaaaacgcttattcatcgtacattataaatgtggctcctagtctggagtttcgttatgggcaaacaaaactcaaataaataggaacccaccttgtcacaataaactcaatagactaatgctgagaagtctccttacttacttcaacatgctcaaaaccctgtaaacaggttcccttggggagaagaaacatttgaaaaagcgaaacgcgaaaacaaacctgttctcgtatctattgggtatagctagctcgggtagctatacgcacatgtcattggtgccatgtttcttaaaataaccacaaaaggcaaccagtttcggctgccttttaataattttattggaaatttttagaaagctagattcaaaaactttttctcttctaatttaaatactgttgttttttcttttgattcattccattttatcttgccctctaatttgtgtcacttaatatcttcctcgggcatataatcaaaagttgaaacgtgattggtttttttcccaccgtctacaaaccgcgagttctgctgattaagaaatggaaagataaaaagctagatcaaatcatagaaacaccttattattgcctttcaaaatcctctgcataaatgaactcaactttttgactgctctcttcgtattccccttaaaatttaataatcactttcccttttggccgtccatttgcgactagttctagcgcttcatttacgttgtctatggtaaatagtgttggatgaattgctggaacaatgttgttttcttcaatgattttagtaatctctttaagttgtgcaccgtcagaacgaacgaagataaaatagtatcctacgttttgtttcttggctttgcgatcatactttgcgcccgcaagggaaaatagcatttgtttccacaatggaaaatttcggtcttttccgaagcgtttatttggtcctgtacggagagagagcaatcttccgcccgatttgatgatactcaattcactgtcaaattctttaggtcccagtgtatcaatcacgtaatccacattcgacaacaagtcaacatagttttctgttgtataatccaaatattggtctgcacccatttccaaagtgcgttcgcgcgcctctgagctgccgctaacaatgacatttaggcccattgcctttgcgattggtacagccatttgaccaaagctgcctgatccacctggaatgaagacagatttacctggctgtgcctcaagttcttcatgcaggccttgatacgctgtgagtccagccagtggtgcagcagcggcttccacgtaagacaaattttttggcatgggtgcaattgcggcagcgtcaattgcggcatattccgcaaaagcaccaattttttcgagggggagacgtgtatagatggcatctcctacgtgaaattctgttacattttttccgactttttcgataactcctgtcaattcattaccaagcgttaatgggaattcataatcttgaatcagtttcacgctgcctgtaattattaacatttctagtggattgactgccgcagctttgacctttaccaagacttcgttttcatcgatttctggaattggaatgtcattgactttggcatggatattttttgaatacttggtgatctgagctgctttcatgagtgttttcatatttttatcagcatcctctatcatattacatttattaggtttttacctttttatataatcgtttaggtggaggggaatcttactttaagcgaagtctgacttccaattttatgattaacccgccacctaaacattcgtgatttttagaacgatcattctcaaatgattaaattttttaggtccgatactgtaaataaatgtttctcatcttcctagtgttattgatatagaacatcgttattatatagatttaataacttgaaagattacatctctagaatcggatagatttgatctcttaattgaaattcatagttttcgtctacaattcctactacttgattactatcataaagctccatcataaaactcgccacttgctcaactgtgtggtacatcgggatatttgctttgtaatcaaattctgtcgtatcagatgcatttttcatgaattctgtttccgtgattgctggtgctaaaactttcaccttcattttcgcacctttgcgttccagttcttttgcaagcccttctgtaaatgcactaacaaagtatttagatgcagaataagtaatactgccaacagcaattgcatatccgagggctgatgatacgttaattaactgagttccctctacatccgaataatcacgtacaaatagtgtagaaagaattgttaaggattctacgttgacacgtaacatggtttccactttatctaaattctgatccgtgacagaagaagattcaccaagcccggcattattaatccaagtctcaatttgatattcctttaaattatcatacagtgtgtatgcctgagctgtgacagataagtcacatgtacgaatcataacatccaaatcgggattaatattctgaattgttgatttaagctcttctaatttatctaatcttctagctacaataattaagtttttgccgcgagcagctaacgctaatgctgtctcatatcctatacctgagcttgctcctgtaataactgtatacttcatattattctctcctcgaaaacaaatttttttttattagatcatccatataacaaaatagattcagtctaatgtcgacaaagtcaaatcaataatgttttctaatttttcctcatcatttgtcgtttttgctaatactcgtatccctacgagtgaattatgaataaattgagaaagccctttgatatcatagtgtttagaaatttctccttgttcttgaccatgtttcagtagatcaaataagaaggtttctgtctttataaaagtctctgtaacttttttagtaaacgatttattccattacgagatcttggctagatgacagatcataatcaactgccactacactcctggtcaccctcaattaggtcaatgccctgttctttgctgtgtggatctgaccatacgggtcaccattttgcgcggcatcaaccgtggaaggaatgccatgaatcggtttcgagccccgggcattattaacgtcttgccacgtaagaagcctcggtacccttcctcagccacctgcccggcctccatgatagcaccactctggaacaacttcgattcaccaatacccgaacgatcaacgaagccggttgacgtcagtcccggacatagagccgtcacagtcacccctgtaccgctcagttcgttctccaaagcctcggtgaacgacagcacgtacgccttcgttgcgtagtaaaccgacatcataggtcccgggaagaaagccaccaacgaagccacattcatcacgcctccttggccccgtttgaccatatccggcaagaacagtttcgtcataacagtcagagccttgatattgacgtcaatcatattcgtctcttgttctaactgcgtctccaagaacgtcccgtacaaaccgaagccggcattattgacaagatagtcgacgacgatccccttctccttgagctccgcaaaaatctcctccggcacaccgggtgacgccacatccttggcgatgaccgtcgcttgactgccatatcttttccgatattccttcgcgagctccaaaagcttaccctcgctacgcgccaccagcaccaaattatatcctcccttggcgaaacgatccgccaactctttgccaatcccacccgataccccggtgataagaacagtttttttcatttgacagcacacctccatttttagtttgaacttttaaaacgttttacagcgtttcttactgcgagtttttactatggatgtatgttatccataattcaaatttttgtatcaagaggatttatacttgccgcatatatctcaactaagacctcgccattatttattttgggcctagggaagtaaaaatttggtttttcgccgtagttttcaatcgctaaagctttcgttacaatcctccacatttttatttaacgcacatgtatcttttcctaacgaacctaagaaaaaagaatatgaatatcccttccctagatgggatattcatattaaataaattattttaagaaaggataatctgtataaccttcttttcctcctgcatagagcgtgttttgatcaggttcgtttaggggagcacctgatttaatccgttctgcaaagtctggattagctagtacccaagtgcctactgtgacaacatctgcaagattattatctacatcagacgaaagttgatctagaggacgacctggacggttaacaagaagtgcttgatcccaaagttgacgcacatcttttaggaattgctcgtttccaaagtgcattaaatgcagatatacaaggttaagcttatttaattcacttattaaatagcgatacatctcaaggctattttccccttcatcaatgccttgcagtgttccttgaggagaaaaacggatgcctgttctttctgctcctatttcatcaacaactgctttagctacttcaattgcgaatcgagaacgcccctcaatcgtaccaccgtatgcatcttgacgatgattggagttttcactaaggaattgttggatcagataaccattcgctccgtgaatttcaactccgtctgcaccagcttcaattgctgaacgtgctgctaaacgaaactcattgataacatcttttatctcaagctcactcagttctcttggtgttgggacttctttcattccttctgccgtgaaaatttctacaccaggtgcaatagctgacggtgcaactgcttggcggtggtgaggtgtgttatcagggtgtgatatacgtcccacatgcataagctgaataaaaatatgaccgccttcactatgaactttagaagttacttttttccaccctctaatatgattttctgtataaataccaggtgtattagtgtaaccttgcccatcatctgaaggttgggttccttcgcttataattaaaccgactgaagcacgctgaccatagtactctgctactaaatcgctcggcgtaccatctggtaaagctctatttctagtcatcggagccatacctatacgatttttcaagtcaatgtttccaatacgaactttttcaaataatctgctcatatgaatactcctttttaataaaaattagaatcaagaaataaatttacgtgttctgcaaatagttctggaaattgaaacagatgcccgtgaccagaatcaggatatataatcagctgtgctttgggtaatttctctgctaagatgtaactgtttttagttggtaccattacatcattaacaccattagtaacaagtacagggtgtttgatgttttgtaaccattcataatcatgattagatttttgtttagcccattttgcaatggcttgtaattgtgcctcttttacttgttctgaactgtttacttttttctgattaaaaattctttgtagtgaagccattcctgcagatttacttgtttcggtttgtgcgtagaaaaagaacataaaatcatttattccatcttcttccgttccgccgtgacgattcattctttcaaaaatctctggatttggattaataccagattcaggcgaagtacctgccataataatttttcttactaaatctccttcttgtaaagctagctcttgtgcaaccataccaccaatggaaaaaccaagaatgtcaacttgttctaatccaagagcttttataaatgttgctgtatcttttgccatatcagtaattgtagtaggcgttattccatctgtctcaccaacccctttattgtcaaataagattactgggcgtttatttgcaatcggttcaagcatgtctggatcccagttttccatcgttcctctaaagtgaacaagaaatactagcggtataccatcttgtgtaccaaattttctatatgcgtaacgagttccatctgcttcaataaattctgattctgatggtattttaaagtttgtcatttttgtgttcctccttagaaattaaaaaacgattttataagtatgcattatgatggtttgtttcatgctaattttagaatgaacgttctaaatagggtaaaaaaaagaaagctagtccaacactgaaagtgctagagtaatgatgccttctaattcttttttactgtaattagtttttattagtactcttatacctaccaaattgttgtgtaagaaacgagatatgttatcagaatcgatttcttttgatatctctccactagtttggccccgttttataaggttattaaacatatcttcagtacggttaaacatttttgtaactatgcgtccaatttctttgtccaacaaagataattcaatggctgcatttactgatagacaaccttttgggtattgttcaatggaattcagtacgaaaataaaaacatcacgtatcgcctgtttaatggatgaagttctgctaattatgctttccatctcattgacgacgagctcttcatagtgattaagggaagctaaaaacaatgaacgcttgtcaccaaatgtgtcatatatactcctgcggtgtatccccatatgatttaccaaatcttgcatggatgttttttcataaccctgttcccagaaaagctccattgcttttcttaatactgctttttcgtcaaactctttacttctagccatttttttctccttaaaaaaatcaatgaaccaatactaacaaaaacaaaagtcataatccattgtagaatgaacattctaaaatgaactcatgaatttcaaaccatgattaaataatatcctttttagaacgataagtaaagaattataaatttaattatcaataatctctggaacaatgtgcattctcatttgagtagcaaaacagttagatctaacgtgtttcaagtatagcaaatttgagaacgatcggtaaagaatttataattaatcatgtgttttatatggctatgcgtagcctgaatttttatgaatatcgttccattttatctctactcaaatcagttctgcaatgtcactggtggcataggatcttttttatattagatgcacacaacaacttcatccaaatacaaaaaacgaatgggaactatatactagttgtttttttatttacagtctaaacaaagtaaaggaagtattacttgaataacttcttttctccaaacgatagctagccttggcctattctaaagaacattgtcatttttgcaaattaggaaactaatttatcatagctagccttcaattaaacgttttaacttaaactcagtttcagtatcctcaactggagtatagacgctgcatcttaaatcagtatccccatgcacttgtaatgaagtaagattaaacaacattttacctaccttagcatgacgaaactcaattaatacttcaggagcagagcttatctcattttcgttccaaattttacgaaactcaggatatgcctgttccatttcttgtataaattgctcataccagtcgtcagccacatactgtccataatacgttctaaatattgcgatatatcctctaacaaaatgctcccaattcactgctaaacttttaaattcctttcttgcgaataataagcgtattatattcctttctgccgggatgatttgttcaaaatccaaaaatacattagctgctgcttgattccatccaacaatctgacttcttctatctgatataatcgttgggcaataacgcagttcctgcaaaatttttactaaagccgggctgatttccttctcattctcatttctaaaaggttgtttcactccttcctctaatgctagagcatacaaatatctcctttcatcgttatttaattgtaatgctctagaaatagcatctaataccgaagtagatacttttatatctctaccttgttccaaccatgtataccatgtaagacttacaccagctaattgagccacttcttctcttcttaatcctggtgttcttctgcgggttcctacaggtaaaccaaccatttgaggagtaattttcgaacgttggttctttagaaattctgataaagcttgaagtcttgtttcaggtttcattaagatctccctttaaaatagtattaattatactaggataaacaacaacttgtaataggataacacaatagctaaagttaataaaaacaaggagggaattatcatgaaaagagttgtcattactggaatgggagttatttctccactaggaaatgatgtaaatagcttttggaatcaactagttaaaggacactcgggaatatctctaattgattcttttgatactgctttttataaaacaaagatagctggaatcgttcgtgatttcgatgcagatgaaatattggggagaaaagaagcaaaacgattagatcgttttagtcagtttgccttagcagcagccgaacaagcattagaacattcacaattacagttagataaggttgatcttgaacgtttaggggtatatgttggttcaggaatcggaggcatacaatcgcttgttgataatgtgaatgtattgaataaacgaggtcccgcgagagtaagccctagccttgtaccaatgatgatttcaaatgcagctgcggcccaaataagcataaaattaggagcacaaggaccatcattatcaccagtcacagcctgttcaatcgggaacacctctattggtgaagctttcaatgctatccgaaatgatgaagcagatattatatttgccggtggagcagaagctgcaatcacacagatttctttggctagttttggaaacgcccatgcactatctacaagaaaccaagatccaagtcgggccagccgtccgttcgatacagatagagatggctttgttatgagtgaaggcgcaggtatcttagtattagaatcattagaaaacgctattcttagagatgcgccgatattatgtgaagtagtggggtacggagctagttcagatgctcatcatatggtagcatcacacccagaaggtaagggtgcctacttggcaatgaaaaaggcattgagaagtgcaaatatatcaacaggtgaaattgatgttattagtgctcatgcaacaagtacacaggtaggtgatcgttcagaagttctagctattaagaaattgtttggtgaacattcccgcaaaattccaacaactgcaaacaaatccatgactggtcacatgcttggtgctgctggcggagtagaagcaattgctttagtggaaagtttgagacgaggaattattccgccaactattaatgtagagaagcaagatccagattgcaacttagatgttgtatcagaagcaagacaccttccattgaaatatgggctatcaaattcttttggttttggaggacataattcagcaatcttgttaaagcattacgattgaagacccatctttatagttcaaaggtgaaataatgaatctatcaagggtttatagcccttgattttcattatggaatacctcacagacaaatgatgacgggcctcagctatctggtatattaaatagaggaaagagaatacttaaaaaaacatttagaaagaaggtgatcccatgccaaataaaagtaaccccaatagattaatcaatgagaaatcaccatacttactccaacatgcccaaaaccccgtagactggtatccctggggaaaagaagccttcgaaaaagcaaaacgtgaaaacaagccggttcttgtcagcatcggctattcaacctgtcattggtgtcaagttcgtatagctacacattatttaaaaaaggacacatataaatatgcatccttacctttttattaacagcaagagttcgttgtactatcacttggtggtgttacacaacaagaggaggaatcttgtttttgattctcgctgttcgatttggtatagaaaaattcccattcattcctatttgggtcagtaatccaaaatttatcttggactgcataacaacaagttgtatccatttcttcacgtgcaaaaacccctctttttcaagcctttccttgtgtttcaaaacttcttccaaactatctacttggaatccaaaatgattcacttgatttcccgtcacctcgtctacgacatttaaagtgaagttcaatccaggagtctctaatagaaacttagcatagtctgtttttactttcacagcctttactccaaatactttttcataaaaatcgatcgatttctccaaactgacaacgttaacccctacatgaacatatttcattttaattccccctctaatatattaatcaaaaaaatttgatttaatgactaaaaattttttagcaacaatctccttcacctttttttctaaatacacaacaaagctcttctgataataaactatttacttcctcatcatttaaatcataatagctccatgttccctttgtctctttcgttattaagttggcatctaataaaattttaagatgataagaaagtttagattgtgttacctcaaaaatctcagtcagatcacaaacacaggtttttcccctttgacaaagttcatacatgatctctaatcgtttctgatcagcaagagccttaaatttttgttcatatttccgaagtagttctgatttcgtctcatccattcatatcgccttctttaatcaattttttttgattaattatgaaacccactaaaagctagtgtaaccagatagaggttttctatttttaatattttcctccatcgctactacaacaaggttacaacttgcttttggtggcaagtcatgaacacctaaaggagaggagatttaattaatctaaagcaaaaaatacaccaatatgatttggtatcttcatctaaatcgagtccctcaacatagtaaatcttcatctacaaaatactttcattacttaacatatatttaagttccttaatacgcaaaaaagttattgcggtctcaccgaaaatttaaattgcggtgccctattgcctttttctgcgaaagaaaacttgttaatatttacattactagtagagttaagggaagggtgaatatcttgatatcaatcacatcagctgaagtgggaatgaagattaatgaatggcataggcatattcaaaaattcaatgttacggatgctgaaatgttaaaggctgaaatagaacgtgatatagaggttatggaagaagatcaagacttgcttatttattatcaactaatggcctttcgacataaaatcatgctggagtatactctgccatctgatgaaaatcgaattgaactttcagaatatttaaagaaaatcgaagggcataagaagaagctagacaatatgcgagcgtattattataacttcttccgcgggatgtatgagtttagaaacggtgaatacacaaaggccattacatattacaaaaaagctgaacgcaaaattccaacgatctccgacaagattgaaaaagctgagttttattttaagttatccgaagtctattatcatatgaaaatgactcacatctcaatgcactacgctgaactttcatacaacatctataaaaaacatgaactttattctgttcggcgtattcagtgccattttgttattgctggcaactacgatgaccttgaaaatcatgaaaaagctctcccccaccttcaagaagctttaaaaggtgccgagctgcttaaaagtaaaaatactcacatctacgccacagcatttttcaatctcggtaactgctatcacaaaatggacaacttaaataaagctgcacgttatatcgagcaggccttggttcaatacagaaaaataaactctgacgtacttccgcaagcttatcacgacctagcgttgatttattttaaacaaggcaaaaaagaacaagcaatggattgcttccgcaaaggaatcagaagtgctgtagattttaaagacgaactttttatgaacttatttgaagcattagacgttctttatataagaaatggcgatacacctaaactcctcaacattttttctcgtttagagaacggcaaaggatacccttatctggaagagctggcattgttaggaggcaaccttttcgattataatggaaaaatagaggatagtatcatctgtttcaagaagatggtatatgctcaaaagcaaatatcgaaaggggaatgcatgtatgaaatctaaattgtttatcagtttatccgccgttttaattggacttgcctttttcggatctatgtctaatggcgaaatgaaggaagcatcccggaatgtaactctagcacctactcatgaattccttgtttgattcgataaacaacattagttctgattccctttagccgtttcataacggctttttcttattttagacatgaaaagcatttcacaaaagctggtcaaacccaaaaactagaactagatcaaaagacacagatcgaatgattcatttccaccctttgatccacataatacttagtttcatcattcttccatggtaatattttgttatataattaaatgagagggtatgaatatgaaagtctttgaagctaaaacacttatgtctgaagctacagaccgcgccaaagaatataaagaactaaggacgcaaatggtcaacttgagaaaagctttacaaagcgtcgctgaactggacgacagcgagttctcaggtaaaggcgctaataacattaaagcattctatcacgatcatgttggtgtcactgatcaatggatcgactacattgacatgaaaatcgcattctttaacagcattgccggagctgtcgaggacaagggcctctctgatgcttatattgaagagtcttttttagaacatgaactggctaacgcccataaaaaatcaaaatccatcatgtctgaacagaaaaaagccatgaaagatatcctaaacgatattgacgacatccttccgctcgacctattttcaacagaaaccttcaaggatgagcttgcagatgccaatgacaaacgcaaaaaaacaattgaaaaactaggtgatcttgacgaagatttactgacagaatatgctatgtcagaaccaaatgaacaattcatcaagtcagacttccaaaagctccaagaagcaacgggcaaaggcaaaaacgctactcccattcactacaacgccaaggcgtaccgtgagagtgatatacataagaaaaaaggcgatattgagaagcgaacggaagcttatttgacgattaagaaagaggaagcgaaggaacgcgagataaaagacttaaagaaaaagcttgcgaatggtgtctcagatccggatgagtatttagaaattgcgaagaagatcgggtatgagaaccttgaacctgcacagttacagtatgtggtgcagctagaacaagcaaaacagctgaagtccgtcggtgaaagtgtaatcaatgcgggtaaaacggcattggatatcatcgatggggttaatgatgggcttaacgatgcgattgatgatacgatatatggcatcaaggacttggttgtaggcgcatgggaattttcacagctccctatggaactaaaacttgcaaaaacaatcacaacagtcttaagtgtcccctcctaccctaaaataatttggacaaacatcgtcgattcatggaatgataaaatgataaatggcaatgcatatacaagagcacattatatcagttatgcggtcggtaatatcgttggtccaaaaggtgcaggtgctgcagtgcaaaccactactaagctctcaaaagtgggtaaagtggttgaaggtggaacagctactgctcatgtcaataaagggataaaccaaggcaaagcttacattaattctattgttagaaataagaatgatcttgcacttgtcgggattgcccaagacatcgataatacgtataatgcaaagaatacgcctttattaaaaaggattattgaagataaaaaagagagtgtacttagaaaatccgagacgtctaacaacatgggtataggtaatgtcaaacaaggtgatagtacccctctcgcacctggtggaggattagctgctcatgaggcaaaaggcgggcatcttatagaaagacatgttgggaagaccgacgaagaactaattcaaagacttgataagagcaaaatgagtaacaagaagatatccggttcatcatcatttaaagatagagcaactgcagaaagagttgctaatagtgctctcacaaataataaagcgaaaatagaaaaatggttaaatagtgatgtgaaaaagcctttagtactctcttataaagggaatgaagttttaggaagaggaataccaaagggagaagatacaattactgatttaactaatgctaaaattatattgaaaaagaacaaagatggtagctttatattaactggctacccaacgaggtgataccatgatagatacaaacatttccgaacctgtttttcaatttctaggaggtatttttcatcaagatatagaaactccagaatcagcactggacgaatacttagaagagattccaaaagaagagcaagaaactgatatagtagcattaaaagattttattaacagtgattatacggatgaagaaaagaatgattttatcgatgaagctgctgacggagtagacattcgtagttacggagtatctccattagtatggctcgaacaagttattcaaaaaatagaaaagaacattgaaactttataatccataaaaggtcccttgaaaattcaagggaccttttattacttcaaaagccctttaatttttgctttcgttttcggtccataaatgccatcaggatttagtccattcatcagctggaaccgtcttacggcatctgctgtttttgggccatacacaccgtcaattccattattcttagctcctttatccgggtagaagtatagtgcagccagtgctttttgaatttgccttacgtcgtctccttttctcatcgggcttgtcactttatagatgccggaaggcagcgcatatgacgttttcttgctgcttaattttgttgttttctttttagctgtacatgttttacttgtgcttgttttcccacctagcgcttttaattctttttcaatggcaaccttaacttgattccatcttccctctgacaaaatacggtgcgggcaatacttaccgttccagtcttggtgcttacggacacgatcaatgccccatccgcgttctttaagtagctgcgccacaaacttaatagcaagattttccgctgccttatatcgcgcccctcctgacttgctataacaaatttcgacaccaatcgacttacgattgcctgtaccgtttgttccatctcctgtgtgccaagcgttacgattcgttggaattccttgaatgacttgtttatcgtctactgcaaagtgaaaactcgttgagctagagttattcttcatgtaagaaatctcattggctgctgaagcatcattcgcagtgttatggatagtgatatactcagctttcattgggttaggacatttcaatccatattttgatttagaaactaaattctttacaactttgatggccatatatcctctctccttctgtctgtgtaataaaaaaagccactggcttagccagcagctctgtcagcgttattcttactctgttctttttcgttctccattgtttgtaatcgatctgttattgttgatgggattttaacaccgatctgtgctaagttttcagttattgacaatccttcattagcgacagcttcctgacgcacgtaggtaaaatatccctatgtgtgtcgtacacctctctgataacaagtgcagttcgtttttcttgaagcaatttcagtacaattttgagtgccacatgatagcttttggatgatccataaccacccacaagaaactgaaacttttgattccaatcaaagagaaattctttaaaatgtgggtttacttgtttaatcatttgtcatcactcttgtttacaatggtgatctcaaaaggtttatcttcttctgtaagttcttcagtctctaatttcttcttgtctatacttaaacgcatatgctctaatttaaggcgtcgttcgtcttccgagtgggctaattcatcaaactgtttaataaagttcctgagctctgccattgccctagattgagcgttcaagaacgttgcatgaggatcccaagaaaattggaattcatactcttcctcttcgccttcgttcacctcagataggatagtctttttctttttcagttccttaatcatttcctgcttatcagaaacgaacatgattttttgcgctcttataattgcggcatattgaatctgaatttggtcccatatcatatcaacaggggatcgctcctgtattccttccatgatcgatagcgtttcttctggcaggaacttagagaagaatccatgagtcacagcgttttgatttctcagtggagctgcaccacctttatttcctaatgcatttttatttccaagcggtgctcttcctcccttatttccttttgcatttttgttccctttaggtgcgcctcgacgcaaaagagcgctccctttcgatttaggagcgctcccttttattttttcttcccatttatcgtttgctttccattttcggacagtgctacttgttacgtttaattgctcagcaatgtcttttaacttcttactcccgccgctctcttcccacaaacgaaaagctttgtctctgcgtggatctcgtggtcttggcattacatcttacccacctccggatctcatgtttgagtttgtgtttgttttaatagtttttttctgatgtgtctactactgcacctttagacaaaatattcattttttcttatttagacttaaatctatgtcgaaaattattgtttgacatatcttatactaactccactaaaagaggtgataacatgtcaaatggttacaatagctccttcgtgttagttgtggtgttgttcatcctgttaatcattgtgggtgcttcattcctttattagtcttgaaatattttaatctactattaaaggaggtaactatatgggatactcgaatggttatggtagcactttcgcattaatcgtagtgctattcatcctgttaatcattgttggtgctacattcctttattagtctttaggcactttaatccaaagcggccttttggatttcacctccctgtacgaagacgccataagaagtttttatggcgttttgctatgttattaacaacacctttaaattgtcaaaataggatagacaataaaagagaggccactttaaaacctctctttttaattaattgttttcggaaatccttaacaacaaggttttccgcagtacttatgatgctcagtgacaggatcgtaacttgagtaactatgcggaaagtaatgaacatgctcataatgttgatgattcacgctagttgtatgctgcggatgaatgtgaggaacaattgtatttgagaacgtatgatgttcacaacacttagtcggatgcaaaattggaggtaaaattttgcaatgatgcatattttcttctcccttcattattttttatctgttataaactatgttcagaagcatctaatagtactattacaaccacctatttactgctccatgaggatttatcaaacaaaatcatgcacatcacaacaaaagctgtatagattacttattagagcaactctccactccacataaataccccatcgctctgccccacgtttctccaactctttatgatcaacgtggggttttattatgaaaagcgctcctcaatatgaatagaacccatttttcttggaaataatcctcctacgaacgaatgcacccgttattagtgaattcgctctaaaagcctcgtttgatagagcccattcaacccttatcatcatcaaacatgaggctttattttgtttttgtcgggaatattaatttttacgcaatactgctggtgttttatcacccgaattcactgtataaaacctcccagttgagttgatcctcgcttatcgctggggggttttctcattccatgaatgtagtggtgacgcaggaataattcgccgcgccgacctgcctcccattttacactacagattttttcggattcaacaagcgctcaaagtggcaatcttggcataattggctgatcaactcgtctttcattttgcgtacagtttcccttgaaatgccaagatgaagacctattgcacgataactcatcccctccatcatgcaatcataaataactttgtgctgctcccctttgatcttttctgcccccaactcaactgcatatactcgttcctcatagtacttaagacgtttgaaaagacgttcctctctcatatccatttgctgcaattctgcctgactcttcccgggacttccttttggcatagctgcttctaatccatattgtgcaacgccccaatttttcattgggattactgaaccatagagcactctctgcaatcgatgaacctcttttgccatccagtgatagctattgattagattttcaatatcttttcgattcatgattgtgttctccttttccaaataaaaaacggacaccaaacaaacagtgtaatactgtaagtttagtgtccgcaggctttccgtcttggacttaagtattgtttttttctattttaatctcgataggtttatcatataaatcttctttcttcttgatcatagttttactgcataaattgtggttactttcatttcctaataaaagatattctctatttatcgaatgtaatatataccatgtttcttttccatcttttatgtaaactttcgtagttttattaaaattaaatattggttttaaaagggctggaatatagcaagaaaaatatacagagataaaaaatgcaacaattttttgagtatttgtctcaaattgaaaagacaaaattaaaccattgagtccagtataaaaatacaaaaggattattaaatatattattgcaataaagatttttagaggtttacccttaatcttttctatgaagatgtaaagtaataaaaatatggacactaacattataccagctatacttatccaccttataatctcaagccaattaaagttgggattataacttgaaataagctgagctattgagacaaaaccgagcgtccagatcaaaacagaaatacaatatatccccaaccttataattaataattgttccttggagtaaaactttttttcaacaatacttgaagaaaacatagtgactggattccccgctcttataagttgtactattaaaaatccaactgcacttattgcaccaggaaaccctaaagaggctaataattgtttaaaagtatcttcgattttaatcaccactcttaaatttcatagttattccattttaccaatttacgctctccttctcaacgcctattattagacgtatcgggtagtaaaaagttgattaatcacctggttttaaattcaaggggataacaactgttggttaattttattatgctacacaaaaaaataattgatcaaatgctttttacctcaccttaaatcctatctcatgatcaactcttgcaaagctcccctttacagtttgaataacagtcttaccgtgctcaggagcatctaagacatgagcagttccctgattcccatctaaaacaatgatctgaacttttcctgggtcaattttctgctgaatagtgaagtcttttttgacgttaatttctcttggattgtacactcaaagcgccccctatgttatgatagaagtaccagttcatatcaagaacactgaggctaagcgcttcggtgttttttatttttaggcagaaacctcttttatcatgatttccaccctcggctcttcgctataaaacttactgactttcaaatccaccacctgattatcatctttgtatatcaactgattcaaagcactttcacaccctttacatagttatcaacatcaggctttgtagtaggccgcaaaagaccattttcagctttctctttctttttttttgagtttgaaactgacttaggcattggtctgtacactttgaaacaggaccagtaataattgtttctggtcgatgctgagacgcaaccaaagctacatactgcttaaaatactttgatttcgctggatttcgcatatgcaccttcccatttctcgtattgatccacgcggctgtccttgtgcgactggctcaccataaacagtgaacttaatgcaatacaactgttctttacctcccgtcaagctgttcccatagctcaatttctttttctattctcggtgcggagagtaaaattgccaacagagacacgactgctttaagcactcagcatccgctccatttgctttattttttcctcaagtaaacggattgttggtgtaagatctttaccttcagttggatttgaaggtccaaatatataaagtccaccaattactttcacattcgtttcctccttcattcccaatcaccttacctatgatttaattgcattcgatcgcctttaataatcactatgtaatcacgacacatctggtgaattcgtgaaccaagagcctcgtctatatccaaaatctcatcgactgttaactcagaagaaatcagcaaaggcttatgattcaaataacgataatttaagactgactggatttgttcaacctgccaatcggttgcccttggctgactgtttattggtttgaataagtcatcaatgaataggacttcgacctttctcatgacatcgagttttacaactaagttgtcaagttatgccagcaatacttatgataatcttctggaatcatggtacttgcaaggaaagaaaaaatgggctcttaaatccgtttaaatctaaacacaaaagaaccgcaactggcggttcttttagtatatattcctatttgacttcattattattggacagtaccataatcaaaatcaatatctttcttgtctaaatccccctcaaaatttttagcataagtcattgttaaatgtacgcttttatctatccaccaagttccatcatcagtattagtatcccaagtaacatctatatctcttcccaaattctcaaaaaacaccaaatttccaacagctactgtttttccgttgattttgtaatatattagaacaattttcttatcaaatatacctgtcccgtgctttacgattgttaaactataaggcttattaggacattgctcttcaagtataacttcaggatttaaaaataaaacataacaaatgaatagaattggtacaatcgttaacctttttaatacttttttattgatatttaacctcttcaacatagtcctccctttttaacaatccatttcatttgggatacaccctcatcattgaaggtatttcctatgaaaaatgattttgaagctcataggaacccttacatgacagggtttttgttgttttttcattgtctattaagatctaaatcaaaaaaagctataaaaaataaggaatgatacatattatacatgactaatatgtatcactcctttagtttttgttcaataatcgcccccgatagtgggataagaaatagcaaaagaacttgctatttctcaaatacatccaccaaatgttcaatgttagtttgtttttcatacatactaataataaaagtaaaaccttattaaaactttacaacacaaactgaatcgactatagtctaattagactaaaatattgatgtaaagaagggaaaaattagatgataaagtcttttttaatgttggggcagtcgaatatggccggccgtggatttttgaatgaagtagacccgatctataatgaaaaaataaaaatgttgcgcaatggacagtggcagatgatgacagagccgattaattacgaccgtccggtctccggcgttggcctggcggcatcttttgcagatgcttggtcgaaagctcatcctgatgaagaaattggcttgatcccttgtgccgaaggtggcagttcattgaatgactggcatccggaaggcatcctttttcagcatgctttgtccgaagcccgcttcgccctccggtccagtcaaatttgtggaatcctttggcaccaaggtgagagtgacagttatcgttcgctacatgaaacttattacgagaaattaactcttatcatcgagacactaagaaacgagttggaacttgatgaggtaccgttgattattggagggcttggtgactttcttggaaagaccggttttggacagcacgcgactgaatttcgacaggttaatgaacaattgctgcgttttgctaatgaacaacagaattgttattttgttactgcagcaggtttgactgcgaatcctgatggcattcatttagacgcagcttcacaacgcaaattcggttaccgctatttcgaggctttttcgaaaaagtaccatatcctgaaacccatttcgggagaggagcaatcgctgaaagtgaatggtgactattctaaaacagaacagatttaccttcatagtatggatttggcttcgggtaaaatcacgtacgcggaatttgaggcgcggatggcgaaggtgatgaaaccatgattcccttacttatccttggcttgctaatccaaaaccccggagctcacggctatgaacttttggccttaatggaaaaacgtcattacaaatacattgttaacttcacgaaaggttcattttattacaatctgcagcagcttgaagaaaagtgttttattgaacagattgagcagaaaccctcaaccagcgggcgtgaaatccgtaactacaaagtcacagattcgggaagggcagaattcgaaaaattaatgatcaaatacggcgccaaatcggaatatgtgaacctgcaattttatggggcgttactctttgcagatgaattcgacaaaaataaattactggatctgatccaatcacaaatcgatcagactaaaactcgaatcgagctccttgatgaatacctgtccatcactcaagaaattcccggcacaatcgattactttcgccgtatgaacgaaaattcccgttcacatcacttggttaatttagagtggtttgaaaaattgaaagcagaaatagaatcaactattgcagaataaaaaaatgcaaagttaaaaataagaatattagttacctacatataaaacctgtgtcgtagatatttagtaacatcttttatacaggttttatactccttctttaattaaacaagtaatagggttgtcagcacttgcccccaacaagagcaagtgaatcagctccgtgttcttcttttcaatcgctagccgttagtttaattagaattcaaataatccaagacgcggtgaactctttcgctgactgagcaatcgccttcaatttttaacactggacaagataaatctgccatccaatgatcatgcaaagctctacttctgacttccattccagcagtatcatataaagaagcccactctaaaaatgcttttgattgttcatatttactgccaccggctaacacttcatttccataacgctgaaattccctatgccttaatctctcaagccgtatatcttgtggaatccataagaagacgacaaggtcaaaataactttttagattatcgccccagccacacactgcaccagaaagaatccatttctcatttattgttaagtctttttcaagcaactttcgtctttcaggaatttctctttttttagtgaatttatctaaccaatagtaatcatcggtatcaagatgcgtatgaggcaaatgctttgataatgcagcacccaatgttgacgttccgaccccagaggctcccaatatgtgaatattttttttcatacttccccctccttattaagcaaccaaactccctgttgcataaggtacttactattattttgacataaatccctaaagacctttacttttctagagaaatccagatgcgtgttaaaatcatcatacttacgaaaacagtcattattaaacggattcatattccatctcctcagatgcattttcctatgaaaaaagtcttgatttccctataatatttaaacgaatccaatttttagattgtcgtctttaaggaggtttttcatcttgaggtatacaaacagtcatttagaggattggattgaaaacttatacagaaagattgatattacagagcctgaacaaattaattttgaacggattgccgaggctttagatattaggctgtcgtttaaacctgttacaagcttcgcacttaaacacagcggaatttataatatatgcttggacagccgtaaaagccgaactgaacaatggtatgattttgctcatgaattttgccatatatatagacatgaaggcgataaaaaaacaatgcctgcaacctggactgattatttagagtggcagtccaattattttacatatcacttttgcattccaactttcatgttgcgtaatattaatctttcgtacatacaatcccatgcaattgaaaatgtagcttggttatttaaggtgtccccttcattcgctaagaaacgtttaagcatttattacaggaagctgactcaacatttatttaatcaaacagttacgggaaatctgtgcaccccccttttgtaattaataatgaaatcctcatgcatttgcgcgcattgaaaaaaacaaaaaaagacgtctcccttcacgatccgatcgggcaggataaggaagggaatgaaataagcctgattgacgttttgaaatcagaaaacgaagacgtgatagatacgatccagctcaatatggagcttgaaaaagtgaaacaatacattgacattttagatgaccgtgagaaagaagtgattgtcgggcggtttggacttgatttgaagaaggaaaaaacgcagcgagagattgccaaagaactcggtatctcacgcagctatgtatcgcggattgaaaaacgggcgctgatgaagatgtttcatgagttttatcgggcagagaaggaaaagcggaagaaggcgaaggggaaataatgcagaagaagccggatctcatactccggctttctctatttcattaaagtttttttaaaaagaaaatagagaaaaaatatataaaagagtgatgaaaatcagttttgtcatcactgataaactcttcgagaaaagcgtctggatcatagcagatggcttctctcttatggggcgttacttccctccatcaagcgattctaagccggacgttctaaaagctctcctgagaaaatccttagatcggtatacttcagtacattcctagtcactgctttctttatagaggcctcatctatgctgtcgatacccttacatatatgactatcacaatgagaggacttttaatgaatatgaagaatcagttaaaaaacattggttagaagcagttcattttaaagaactactcattttatttcttcttcaattaaatcactggcgtttaagtacaattcttcacaatctcttctgttgactccaatccctaagtagtgctcctccagtacggtgacacatatagagggacgagaaaatctcatttaaactgcccatccgatggcgggcagtttaattattacctctcctgttcctttatcaccctctcaatcccatataaaatcagtttcaagccaaactcaaatgctctgtcagtccccatcaactcaaacagcccgttcgtaaacatcctccggaataatcccgcatctgtctcgctcatggaatcaagaaggcgtatcatctcctcccccggatgctcttcttggtccttcaggatagcagtgacattgcgctcatgctgataatcgtctaaaacgaagtagaagacatagtttacaagcgtagtaaccacttgcattttctgctcttgcttaagtggtgttgattccacgcagagtaacattcggttcgtgaatcggatgatgtccggttcatggggcagcgtcatcatcatgagctgcgtagagcaaggatatcggctgagcacgttccgtaccgttatcgcaagccccatcagctgctccttccagtctccctcggagtggaactcctccagaatcattttcgatacttggttagccagacgctggtaaagcttctgtttgctcttgaaataccagtacagagagggagcctgaatccctagcctgttggccaatcgtctcatgctgaatgtttcgatgcctccctccccaagaagttcccacgaggtttctaaaatcttttcctctgaaatctgaggctgctgctttttcatattatccgtccttttatctaacagtgtaagtttctctttacaggtttataaaatgatgataccatctaacactgtaagactcaaactaacagtgttagattaaatataaacaagaaagaagtgaaatataatggatacagaaaacctctattattttgaaaaagcaccgatcgcaaaagctgttgctcacttcgctataccgatgatgctaggtacatcaatgagtgtcatatattccattctaaatgcctttttccttggtacactccacaataccgccatattaaccgcactcgcattaaccttgccgttatttgcaatcattatggcgctaggcaacttgattggcatgggcagcggtacattcatctcccgtttgctcggggagaaaaaatatgatgatgtaaagcatgtatcctcatttgccttttacagcagtttagttcttggtcttattgtgatggcagtgggtctccctttaatcgatccaattgttcatggcctgggggcaacatctgactccttcggcttcacgaaggactatgtcatggttatgcttattggttcacctttcgtcgtattatttttcacgctggagaatatcgtgcgctcagagggttcagcaatcacgtcgatgaccggtatgattctcagtgttgttgtaaatattatgcttgatgcgttagtcatcttcgtatgccattggggtgtaatcggagttgcgtctgctaccgtcatttccaacttggctgcgagttcattctatgccttccacatgggatataagagccagttcttaactgtctccgtaaagtggttcaaggttggcctggatattctgagcaatgtattaaaaatcggcattccggtctttattatgagtatttttttgggggcaatgtctcttatctttaatcattttcttgtcgaatatggggacaaagccgttgctgcatacggaatttcatcccgcttatttcaatttcctgaatttattttgatgggactatgtgaaggggtcgtaccgttaattgcattctcttttacagcggataaattacgcatgaaaaataccattggatttacattaaaagcgattgtgacgctagcagtaatgtttggcgttatcgtctatttaatttccgaccatctaataggtttatttacaaatgacccgcaattaattaaaataggcagctacattctacatgttacgtttttatccatatttattacagggatgtcctcattatttactggtatcttccaagctaccgcgcaaggaacggccgcttttgttatgtcatttatacaaggaattactctgattcctgtattgttcatcgccaatcaggtgaacggctttcatggggtggtttggtcacttgtcattgcagatacagtcgcattccttgtaggtgccatcatgctttatgctttgaggaacaaattgcagcctgaattgaatagttaagtgctagtaaacatatgacatttaaatccgtattgtaaactaatcaaatatgtaaaaaaagatagtttagccctcataatcggctaaactatccccttctcaaatcctcccactttattattaatgtggtttagaagaattgaacctgcacgagttattccgctcactatcattgattatgaagcttatatattaaaaaatggtgagctcaaaacagtaaacgtcgggcttttttactctcttccttttaaatacacgattagaatcatcaaaaacaataatgatatttacacaaattgcgatttacgcaaaagtcaccactcctcttttcatggacagaaaaagaggagcaaacctatgtctgcgtcttaacgtttttctttgcacaacgtctagtatcttctttggatcaatttttctgtaagaaattcaacaagtgttactcaacgacatgaagaaattgtttatgtccttgtcatttcagttattcaactattggtgtaagtgaactaccagcccatacctctcccttattaagggtccagctgtcattataaaaattagacccacctttattaaccgaagggctgtgaacctcatcccaagttagaaagtacacggttttcggatatttttgtttgactgtattaagaaacacagcataatccaaattaccatcttgtttttgtgtgccgatttctgtgaacgcaaatggcttattaagagctgttaactcatcatatccttgaattgtaaaatcatctgagaaatacgcatctaatccaacaatatcaacatatgaagatccaggataaaagtcagtcttaaagtctcgattggcgtccggtgagtaaacccatatcaggttgtccaaacctcttgtatcagtcatataatgatagattttttgataaagttgtttataaagtgagaagcgctggctgtcttttttgttatattcggttagtccccaccaaaaccattctccattcatttcatgaagaggtctgaatagaacaggtacaccttcattttttaactgatcaaggccatctgcaactttgctcagaacagcctctaatcgcttaccctctgtagttgatgagtctaagattttttcatactcactgtttgaaatatgggaagcatttttcccaaaagtactggatgcaggattagctagatgtaagctaatctgtggtattccaccacttttccaatatgagattaagtcactgttgcaactatagtcgatcgtctcagtaatatcagaaatatagggcttctccaaccatccactggaatagtcacaaccataaattgcgggtaactggcctgtagcattcttaattcggttggcttctttcatggaaaacgaagcatttgtgaatccgccgaatgtacctgacagtatgcgattttcagatcggtttggcagatgagccagccaattcatcaactctttcgttgttgcctgtgcattaggattcacagggtaaactgtatgagcaagagccgactgtgaaaaagatgaaaggattatgaaagatagtaatataaaaacagcaatttttttatacataatattctccgtcttctactttttattattttaatcatttattctgttaaagatttataaagcacagaatctattaagtcatttacgctttttcatcccctttcatatttaaaataagagagaccttccttagagatatttgcatttacccattgtaaatctccattttttgggcattaattatattaaaccgaaaaatatcttctttcatcagacgtttcacctattttttactgtatgcctcacagactataaagcaaactttcccttttgcatttaaaccttattacctatttcattaagtcgaattattttcgatattaagtggtgaatgattttcactctcttttttatcctattaaattattttaaaaaataatcaaaaaacaaatcattttgatccctattcatagcagcaaacgttacttttggtacaaagtcctttataaacagaaagaggagcaaacgtatggtttactcctctaacttagtttctttcttcttggtttttcataatctgatgttttccttaacagcagttccaacccgtcactttctccgcagcatataatcaagattctaataccaatccaaaagttattttgatctactgagaattttaatttgcggtgccctattgcctttttctctctctgactcatagttttaaaccattcaataaaaaaccctcaattgatgtttcatattcatttgattttcaaaaacttcagccgtatcaacctgttaatcttacccgctgacttatatcaaaggagctctaaccaaattttaatggctgtcgaacttattaatagcgctaaaatccattgcaggaattttgtatttactttttgcccaactgatgcgccaataggagaagcaattaaactagcaatcataagaaccagggctggtacaaaaagaacctggcccgtaattacttttccaactgttgcgccaatagatgaaagaaatgtaatcgcaagagatgaagcgactgtgattctaacaggaatatttaaaatcgataacataatggggactaggataaaggcgccgccagctcctaaaatacctgatacgccaccaatgataaacgctagggacgaagccaaccatttattaaatatcacttcttcgccttctctatgggcttgtcctcttttaggtataaacattaaaataactgctataatagccagaattccgtatataaagttaattcctttttcagatatataatgagaaaagtaactccccaatacactccctaaaaggatgctgcttcccatgtaaattattaatgctttatttagaagaccactcttacgataagcccaaacaccgccaagtgtcgcaaagaaaacttgaatagcccctatccctgaaacttcatgggcagttaatgacatcactctcactaaagagggaatatacaacagcattggataattaataactgctccgccaataccaatcattccggaaataaaggcaccaataaaccctataatgaaaagagttgtgataaaggcaatatccactttggtttcctcctatcaaaggaaaagggtatctttctattcgataccctttcacattcattagcctttttgaatccaaaatttcaatacatcgccctcgtccgtttgctctaaaaggtcatgtccgcctgatttagaccaggctgcaagatcatttttagctcccttatctgttgcatgcacttctaatatttgacctgattccagttcattcatcgctttttttgtcctgacgattggcattgggcatgccaggccttttgcgtctaatactttatctgatttcatgttcatctctcctcttattaatagaaacttgtgttaccgtattgcacagcggtttgggccaatctccatttcacgctgtttttcttcatctgggctgattttccccatgtttgtttctcgaatctcttggtatgcatttggttgcggaggcaaatgatctgttactaggtgtctaaattctgtttcatccgcaatgttcaaaccatggttctcgctaaataatgtacttagttttttaccaacacttccatcctcatttagctcgtcaatgatcataaagtgtgccggtaatacaattaaatcctttgataacgctttgtaacggctataaagcgtttttcttaaatctcctacccaatcttctgccataccggctaagtctggtctgccgattgaatcaataaacaaaatatcacctgaaagaagatacagatcatcgacaatgaaagaagtggacccaatcgtgtgtcccggagaataaatcggttgaattttaatcgttgtatttccaatgatcatgtcgtttccttcttccaacggctgataatcgaataccacttcttcagcatctttaggcggtaaccagtaggttgcttttgttttttcagcaatgactctgccgcctgaaatatggtccgcgtgaagatgtgtatcaaatacgtgagtaatcgttgcacccttctccttcgcaaaatccataaagaaatctaccatacgtgtcgcatcaataattgctgcttcaccattggaaatgaccatgtatgacaggcagcctttaccgattcgaacaaactgatacatctcaccgccatcttttaaatccccgacttttaccggctctaaatgttcgctccatgctttcattccacccttaagataggatacagaatgacctgcttcagatagcatttcggataccatgacggatgaaccttcttttgcacaaacgaccagcacttctttatcagaaggaattttctccaatatatcttctacgccatctaaaagatcaaaataaggaacattcaaatggtcaaagtcatgcccttctatcttccaatcattaaaatcattttcattacgcacatccaaaataaataaaggttctttgttatagattttttttgtcacttcttttggggtcattgcctttacggtcatgtttcaatacctcctatatcaaatcttttagcggaactaaaacgttaaggatacatcagcatctttaacaaaattctaaaaaggtaacagccccgcctacttcgattccttgtataaattcatcttttgttaaacccataacgtccatcgttatttgacaaccaattcatgcaactcccatttcaatcagttaagaatagaaggcacatttgcgttcctacaaccttctgcgacatgctcttttccttgtcgcaatattacagactttataagcatcaaacagaccgccatttgccgcaataatcgctactcttgtactcatctgttcatcatgctttttatttattcggttttacctgtccactcccgcataccggggacaacattaataacttttttaaaaccttgttttttcatggtgtgggccgccatttcacttcttcttcccgaatggcagataatataaatttcatcatttttgtttaattcattagagcgcttttccacttcaccaagagggatatgcacaactccaggaatatgagctttttcatactcctctatctctcgtacatctaaaatgttaagagactcgtcactatccactttctgtttgaaagcttctaatgaaatatcaggaattgaagatgcattttctgatgaatgctctcctccttttcgaagaaaatgacgaagtatttctccctctgcttcagtacctagatattcatggcctgtactttttgcccatgcttccagatctgctgtggaacctttatctgttgcttgaatttccaatacttcaccagcttttaaatccttcattctcttcttcgtttttacgataggcattggacacgccaaacctttagcgtctagtacaatagttgctttcatcattttttcctccttttttcatataggggtgggggtatataaatatacaaaaagtttctcactagaagttaataccatgtattcatgcccccttttatatttgtgatgtttttaaatccttgtttcttcaatatttttacttgcctttaaacttctcattccgcttagcaatgagtaaatgagtagcattagataaataagttgacactgccttcctcagcatctgccaaataagctgctacaccagcatagtcgatatcatctaatagttctttttcctgtaaaccaagaagatccattgtcatcgtacaagctacgagctttaccccctgttcttgagccatctcaatcaactgaggtaatgtaagtgcattatgctttttcatcacatttttaatcattttagggcccatacctgcaaagttcattttagataaacccatcttatcagcaccacgaggcatcatctttccaaacattttttcaagaaatccttttttcactggaatcagctcttctttacgtaaagcgtttaatccccaaaaagtatggaagatcgtcacttcatgatcgtaggcagctgcaccatttgcaataatataggctgccattgccttatcataatccccgctaaataaaacaattgttgtgcgttttgtttgttctgtcatgtttattcccccaactaattacccctgtgggtatattaaagtcaaaaaaattttttcgaaagatctgcttttattcaactctttaaataccatagggggtataatataacgcatataaaaattcgtcaaccttaggttgatgaatttttatcggctctttaccaataagtcaactgcttcttttactaaattttgtgtgtcttcgcctttttctaaactttcacgaacacaatgttcaaggtttgtgctcacaattaaacccatcgctcgatcgatcgcattacgggaagctgctaattgggtcacaacctctctacaatcttttccttgttccatcatagtcaatacacctttaatttgtccttcaatccgtcgtaagcggtttttaatcttttgatcatactccatatatcaatgaaatcctttctttcatttatttttacatttacatgctgccagttcataactgtttacatggatacctttgcgctttagaaaacgcactcctaaatttaattccacccgatcacgagctattatgtgtattttatcacgtggaatctctaaataaaaacgttttagatacgcatatgggatgtttaaaataatattatccgaaaaattggctacatcgttataatgacgaatatctaatattgtgatgtccatagcctctaatttatctttatggatacaagagattccggttataggataataccgtctatacgatgcaatgataatcacaaaaataagcaggaatgcaataactaaataattgatactacttacaccaccttattaactctttgttattcacaaaactataatatacccccataggtatatagtcaagtgtgaaagttactttctttgagctgatagattcatttcaatatccgcggattgaaaaaatacttacatttcgataatgccaattctgctaaaagtaactcgaataaagaaataagccgattttattttaaatcgactttattttatcaattacttttaaaattagcacaagactgcttggatattacattgggtttcatttgcataaaaacaattcttaggtactggttccccatgtttcatgctggatgtgactccaattactcagaaatctgcgaataactatgctaatcttccgcagccactgcatctgctttggttttatgaactgtaccaaatggatggttaggaggagcataaatggagtaaagttttaatggcgtattacctgtattaatcacgttatgccaagtgccggcaggtacaacaatggcagaatcatcataaacatttctttgaaagttcaaatgatctttgctctttcccattttgacaaccccacgcccctgctcaatccgtaagaactggtcaacgttaggatggatttccaacccaatgtcttctccaataccaagactcatcaaagtaacttgaaaatgctttcctgtccataaagcagtacggaacgtattgttttgttttgtggctctattgatatttacaacaaatggttttggtccataatcctttaaaagaagatttctatcttcatatgaagagcgcaaatcggcacctctgtgtacgttctccatctcatttggaatagtccaataaacagatcttccatcattatacatcggtacagtcacataataataacattgaggcgaaaaagggttatagtacattttttgatccccacaattataaatttttgtgatagtatcctatgcatttattaagggagtgtgctaaatcaagaaaaatcatattaaacacaaaaatgaatgttcgatcaccgtttgattcacggatgaataatttatcaccgaccttgtaatcgttttctggatgttgaatttcactagcctttgttaacaagacatcgaatgacacttttatatcatggattatcaaaggtcgacgatcctaaatggcttttgaacatttacatagcacaacaacagagtatacggaattctgttgtttgtcccccctatcccagctcttttagatttatccctttggatgcgccttgatggccagcttttcagcagcgtagtatttagcgcctcctgaatcgttatagcatatttcaacgccgataaacttgcggttcccagtgccgtttgtaccgtcacctgtatgtgggctcgtttttagtaaaccagtttatattctttttgggcacacaatagaagcaatttttcatatgaaaatttcgtaatcttacacctctttaacttgaaggaggatttttgcatatgtattttcatacccgtcaactaccatctcatccagcatatattcctcatatgcattttcccctatttgcattccattcttttcaatgaactcaatgattctccggtacgcctcttcagtatttccgcctatttcatatccaactgcatacaggccttttggccgtacatgataatttatgttctctcccccattttttacttttatataaaagtaactgtaattgtagaagtctttttctaagatttgttcccgtgcaaagattccgcctatcggatatccttcatctaattcatattgctgaacttcatgaatgagttctgaaatggctgccacatattttcgttccggtaagtttaatgtttttcggcttaacatgaatgtttcttcatttaaatattcaaaagaaattgaggaaaaatcagtctcaagtgcttgttctgtaagcgtcacttttgtttgtaagatcgtttgcaactgcttaagctcatttatttttttatcaatctcaatagacttttcttttagaacatgcaggatcttgtctggtgtttttccttttattagacactttatttcttttaatggaaccccaagctctttaaatagactgatgacttgaaaaatctcaaattgatgataggaataatatctatacccattttctttttttatttccggcgagaaaagaccaatctcatcataatgaaataaggtttgtttttttacacggcagagcttcgaaaactcccctgttgtgaaatacttcttaacatcttcgctcataaaaacctccttgactatacggtaaccatataccttatgatttgattgtacttgaaaaaagcttcaagcgaaaaggataggtaaaaagggttcaattgagtaaaaggggaattcagatgaaaaaatcaataaatgagcaaaaaacgatattcattatactattaagcaacatcttcgtagcatttcttggtatcggtttaatcattccagtaatgccttcttttatgaaaatcatgcatttatccggcagcacaatgggttatcttgttgcggcttttgccatttctcagttaattacttcaccttttgcaggtaggtgggttgaccgtttcgggagaaaaaaaatgattattctcgggttgcttatattcagtttatctgagttgattttcggattagggacccatgtttcaatattttatttctcgaggatattgggtggtgtaagtgcggcttttatcatgcccgcggtaacagcatatgtagctgatattacaaccctaaaggaaaggtcaaaggctatggggtatgtttctgctgcaattagcacaggctttattattgggcctggtgcgggaggatttattgccggctttggcatccgcatgccgtttttcttcgcctccgccatcgcgttaatagcagctgtcacttctgtttttatactaaaagagtcattgtcgatagaagaacgccatcaactctcatctcatacaaaggaatcaaatttcattaaagacttgaagagatccattcatcctgtctatttcattgcatttattatcgtctttgtaatggcttttggtttatcagcttatgaaacggtattcagcttgttttctgatcataaatttggcttcacaccaaaagatattgcagccattattacgattagctccattgttgcggtagttattcaagttttacttttcgggaaattggtcaacaaacttggagagaaaagaatgattcagctgtgcttaataaccggtgcgatcttggctttcgtgtctactgttatgtcaggatttttaactgttttgcttgtaacttgttttatttttctggcgttcgatttgctacgtccggccttaaccgctcatttatccaatatggccggtaaccagcagggtttcgtagcaggcatgaactccacatacaccagcctgggaaatatatttggacctgctctaggcggtatactatttgatcttaacattcattatcctttcctttttgcaggtttcgttatgattgtcggccttggtcttacaatggtttggaaagaaaaaaagaatgatgctgcagctttgaattaattcattttctataaagtcaagtcatttggatgcagggaatgcccctggttaggcacaataagaaaaggtacttaatttgataggctacatgttgcttgacgtgaatatagtttaagctgagttttagcaatatcaggataccgggataagaaaaaaggagaatgtagtatgagtataaaaataaaaggagtaactgatgataatcgtgctgcaattcttgatctacatgtcagccagaatcaattatcatatattgaatctacaaaaatatgtttagaggatgcaaacgaatgtcactattataaacctgtcgggctttactatgaaggagatctagtcggttttgcaatgtatggattgtttcccgagtatgatgaagataataaaaacggacgagtctggcttgaccgattttttattgacgaacgctatcagggaaaaggattagggaagaaaatgcttaaagccctcattcagcaccttgctgagctatataaatgcaaaagaatttatttaagtatatttgaaaataatattcatgctatacgcctttatcaaaggtttggttttcaatttaatggtgaactcgactttaatggtgagaaggtaatggtaaaagagctatagatatccaggcctccttttttgctgagaaacgtttgaacttcgataatgattacctacttaaactgcaagatcattgtttaaaaaagcctggatgaaaatttcatctcaggctttaagcatcttattagtcaaaatctcatgtgttttatccagatgttattcttttttccggacaatttctaaataattaatatgccggccaactgttttgtgcactttaaaaatatacccatcggcttctataacggacccaactgcagcgtctatttgttgagtcataaaccagccgcctattgtatccacttcgtcacttgctaacgtcgttcccaataaatcatttacatcttcaatgagcactttcgaatctaagatatagtgattatcatttacttttctaatattaggcacttcatctttatcaaattcatctctgatttccccgacaatttcttcaagaatatcttcagcagtgactaaacctgaagtgccgccatattcatccacaagaatagcgatatgtgttcgctctttttgcatttttaccaataaatcatgaattggaacggattcaataacatggataacagggttgatatgattttctaacttgaaatcctcttttatcttctggtctgtgtcaatataagctgacaaaaattctttagcattgataaaaccaatgattgaatctttatctccatttaggactgggtaccttgtatagctctctgtcttaatggtcttaacaatagtttcataagaatcctcactagaaatcgctacgatctctcttctcggaatcataatttctttggcgattctttcatcaaattcaaaaatattatttacatatttcaactcattttgattgatttcaccgctcttatagctttcagacagtaagatgcgcagttcttcttcagaatgagcaagttcatgttctgatgcaggtttcaaaccgaagagtcctactataaaccgggctgaaccatttaaaaaccatataaaagggaacaggatgcggtaaaaccaaataattggctttgcagtcaaaagagtgatggtttccgctttttggatagcgagtgttttaggagcaagttctccaactacaacgtgcaaaaaagtcgccatcacaaaagcaatcactaagatcaatacatgtgagactgtttcacttacatgaaaatgagcaaataaggggtgcaaaatcacttcaaaagtcgattctccaacccagccaattcccaacgctgtaaccgtgatccctaattgacaagctgacaaatattcgtccaaatgagtaatgacctttttggctgatacggcacctttttttccctctaatatgagttggtcaatttttgatgacctgatctttactatcgcaaattcagtcgcaacaaaaaatgctgttaagacaattaaaatagtaaagattataaggttaatggttgtcaatgatttgccttacctagtaaggcgtacacctccgatataaatatttatttttataacccgttttttctgaataaacaaaaaacagtatatataacattataagttcaaaagaacctaaaatcaactctgaatgatgtaaataatcatctttttccgtatggagagtggttcccgtagtattcaactagcgattggtgacgttttaaggcttaaaatagaaagcaaaataaaaacacacctgaattttctggtgtgttttaataatatccaaccgtcttgatttatttaatgtctttattaaggttttcttttaaaatttgaatcaattccgcctgttgctttatatttttgcggccatttctattaattgcagcaagttcacagacaattccagctgaaatgaaaaacaataaaccttcaaacattttaaatcccccaccatctaagtgatagtcaaatttgttttttctttttgtaatacctgcttataatcttccttacgctgatatatgttatttaaaatgagtccaataatgacaaacagtgttcctactatatcaaatgcagttatgttatatcctttgatcaccatgattaacaatgtagtaatggggacaaagttaataaataaaatcccattaatggatgataggattttaatgccatagttccaactaaggagggctatgatacctggtaaagtaatcataaataaaaaatcatacttaattgctgcaatcactttaatactcggtaccgacacgtaaccttgcgcggtaagtatagctgtcatgattcctgttatagctgtgccgaataaacatgtcaatgttgaataacgaagtgtggaccactctcggaatatctgtccccccattgtgtagacaacccaccctaaaacaccaatgaatataaagagtagcgagaatagatgatcccccaataaaaaaaagaaacttatattacctttggttatgaccatcgaagcccccaaaaaggcaatcaatatactgatcattgtgtattttttaggtttcacatgtttatatccccatagaataacaattgaaagcattggcatgagtgcctcggcaatggatgctgtcataattccagacttccccatcaacctttgacctaaaaaaataagaacattgtatacagtaaacgccataaccccaaataaaatgatccattttgctttaccctctaaatgaaatgatttttttccttctcttaccaataataaaatcactaacataatcgttaccacaccgtagcgaataaatgaaaaataaaacggatcaataacttctaatgcatgatctgcaactggaaacatcgcgccccaagacatacttgctactaaacatgtaagggcaccaatgaataattgactttttttcattgaattcccctccttttctttaaaattacaatgagaattataaaaagaagtaagcatcaagtaaaatgaacaaaagtgatgaaaaacatcattgataatgatactttaatgaagggggatcttcatggaactgcgagacttacaaattttcaaatgcgtagcccatcacaagagtattaccggtgctgcaaaagagttaaattatgtacaatctaatgtaactgcgcggattaagcaattagagaatgaactcaaaacacctcttttcaatcgtcataaaaaaggggtttcactaagcccagagggccgaaaaatgattgaatacgttaacaaaattttgaaagatgttgaagaactggagcaagtctttctagatactgatataccttctggaatattaaaaatcggtacagtggaaacagtgaggatactgccgaccattatagcttcctattataaaaagtatcctaatgtggatttatcattgcaggctggtctaacagaggaacttattaaaaaggtcatgaatcacgaattagacggagcttttatttcaggccctttgaaacattctatcctggaacagtatgatgtttatactgaaaaacttactcttgtaaccagtaacaaaacgtttaatatagaggatttttcaacgactccgattcttgtttttaatcaggggtgcgggtatcggtctaggcttgaacagtggctcaaagatgaaggtgtgctcccaaacagaatgatggaatttaacatcctggagacaatcttaaatagtgttgcacttggactcggtataacagtggtaccggaatctgctattatgcatcttgctgcacaaggtaaggtttattgtcacccattacctgagaaagacagctgtatctcaacaatctttatacgccataaagatgcgtacctgacaaattcaatgcgcagcctccttaagaccattgttgaacataaaaatatgagtatgtcttaaagtgctttttctctttctatgttaacttcttaaataaaagagaaagcgcatctccacttcgctacccttattcacgcaaaaaatagagcagtaaacatgtgagttactgctctgcttcgtttatccaccgttcatttgttttacaatgtattcagcatcatttcctacaccttgaagcaacgctgaacctcgcttatgctgccaaggcaaccctataaagtacaatccttctacaggtgaaacacctctatgatgtatgattcgaccttctttatccaaaacaccttttatatttatccaacataagggattcctgaaaccagtagcccaaataatattgtttacttctaatgtagatgaatctttaaaaatgatttcattttgctttgcggcaatgactcttttttttaagatgatctccttctgttttattgcatgttttaattcatgcccaaatactggatcacctttcttttgaatgaatttgcctactattgatgtatgacttgcatgtaaaactcctagtttatcaaaccaccaaaagatgcttctttttcctatcattaaagggaaataaacaagtttattactacaagctaaatatgtaactctttctttggataattcaacagctatttgagcaccactattcccaccaccaactactagtacatttccatatgccaattgttttgaattcttatattgtgatgagtgtagttgattaatattatcggataaatcctttgatattgatggaatattaggggtatgaaaaggccctgtagcaatgacaagattcttcgtttgatattcttcccgatttgtttttattaagaaataattctttatttttaggacacttattacttctgtccgtaattggattggaatttcaaattttttaacatacttctttagataagcaacaatttcattttttgaaggaaatccatgtttttctccttcaagatgcattccaggcaaagagctatacattcgagaagtaaataaaactaatgagtcataccgatctttccagctctcccccaccccatgacttttatccaaaataataaacttttgatcggactgctttagataataccctatcgagatccctgcttgaccagccccgattactatagtgtcgtacacattatcaccccgccaatttcaaattgtcagtagacagaatttgcaaaatgctagttgatctcctcactataaagttagataaaaaatttaatggtgatggtggttacgcggcttctccattttaggctgacaaaggatcgcattgtcgtgattatgcgcttcggtttccatttgaatggttacgtgcgtaatgcctttatgctcaagttcatgttcaattttgcgtaaaatattttcactttctgaaatggtcagttgatcgtccacaactgcatggcaagaaagagcattcaatccgcttgtgatagaccatatgtgtaaatcatgaatgttttgaattccctctgtcccttcaattgtacgaatgatatcagagacatcgatattttctggagttccttccattaagatgtgaatggaatctttagtcacattgtaaccgcttcttagaacaagaatagccacaatgatactagccaatggatctgcccagccccatccaaagaagatgataagtatggcagctaaaatggcacctacagagccgagcatatcgcttattacatgtaaataagctcctcttatattcagattattctttgtatctccgccactcatcataatccaagcgaccaatagattcacaactaacccgatgatactaattgtaagcatgccggttgctgctacttttggtggattagagaagcgttcgattgcttcataaatgatataaagagaaataagaattaaggcagcaccgtttatcacagctgcaagaatctcaaatcgtttatagccgaatgtcttattgtgatttgcctttttttcagctaatgtaaaagcaatcagggcaaccattaatgaaattgaatcactcagcatatggcctgcatcagataaaagcgccagactatttgttaaaaatccacctatagcttctattatcatataacctgtaatcatgataaaagagatcaataaaacctttttatttgctccttcattatgattgtgacccataaaaaactcctccttaactaaagtttttaatacatatgtatttattatttcaaatctgttatgaagcattctaacatgatgcaaataatatttatatatgagcatgtgttcatatataaatatatctgctctttactgaaatgtcaaaatattttttatagaaatcaacaatacctccttaattattctcttattaacataaaaaagcggaacaaacacatggtttgctccgctaacctagtttctctatccttttcttgtagtatgcaactacaatttacctgttaaaaattaggcctcaccaagtccaaaactccagtcagcattatcattttcaacaatagatacaattaaatcagttgatgcgataccacactcagattccagtctttcggctaacagcctgtagaatttttgtttcttctcttccggtcgggatttacttgtaacagaaagaacaacaagatttttggttcggttaaatcctaagcctgtatcctcaataatcatatgattttctggatgttcatgcacaatttgataacggtcctgttgaggcacatcaaaagcctctactacaacattgtgagcgacatctaaaagttttttcaaacttgattgatctcgcccttctattaagtcaaaacgaagtaatgacataaaatcccctctttctactgtcagatatttctaatcatctgctacataatgtgctcatttttattcttactacattagaataaaataatttcccaataaccccttcattctgttgttagtcaagcctatgttatgatgtgtatttccataggcaatatacagaatcaacttcgagtaattaaccattttttgaaatagccttatcacttactctagaaatcatttattcttctaagctttagtttacatgaagctctgctatcatatataattcaaaattaagatggaagacatctcaaaatcagatatcaattatggaggactgcatgaatattcagttgttacaggtttttctcactactgctcgtgaaggcagtatttccaaggctgctcagactttaaattatgcacaatcgaatgtaacgaataagatacaacaactagaaaacgatttacagacaaaattattctatcgccatagtcgaggaatcacacttactcccccagggcaaattcttgtttcttactcagagaaaattctacatactattgaagaagctagagcagccatgggcgaatcatccgcgccttctgggccactgcgtataggatcaatggaaacaacagctgcagtttggcttcctcaactccttgcacattataataacctctatccaaatgttgatttgaacctagtaaccggtcctacggaacaacaaatacaagcagttttacattatgagttaaacggcgcttttatttcagggcctattgaacaccctgatttagttcaagaaaaggtattggatgaagagatggttcttgttacaagtgcttcacaccctgtgatttcttccattcaggatgttcaaacacaaacaatgcttgtattccgtaaaggatgctcttacagagcaaagctcaatcatatcctccaagaagaaggtttattacctataaaattaatggaatttggcatacttgaagcgatcattggctgtgtaagcgccggcttggggatttcactgctgcctctttcaatcattgcttcgcatgaaaaagaaggccgcatccgcagccacactatctctgacaaatattctttcgtatcaactatgtttataaggcggaaagacactttaattacccctgctttatctgcttttttaacgcatatgagggatcattttcagataaagaggccagatcaatcgtaaataaatggatggaaggcatgcttcgcctcaaaatacccctgatcagttgtctgatataaaaatataggcgcatctcaatgtttgtatagagcaaaaaagcaaacttcggtatgtagtttgctttttcttcgtgattttgcactcagaatcgtgaaacctagtcgatattaggatgtagattttcctcattcaaagaattttgaacgaaggtcattgccctagacacttggttgcgtcttgaagttaaaggctgactatttcctaaagcgtcaatcgctctcacaactattaaatattcacctacagatttcgggtgacaacgggaagattgatattttcggttggacaggggcagaacatccaattgtaacagttgaagtatccactgatggaggagatcctgcagatctgagtgatattgctgttaattgatcaacttgtttttgttcggaatatactcagtatatagccgcatattcctcctgcaatagctggaatgagccaccccagccctatgttatacatagggagaatctgagagaaaatatgattcacaacttcaatttttattcccgcctccttcaaaccgtcaaataagctgatgatgaatgcgaataataaactgccttgatacacttctgtcttccctttaaatacagaatgcaaaaacgttaaaaatattaaggaaatcgcgataggatacattgtcagtaagacaggcattgacaccttaatgagctgggttaatcctatatttgcgacaagcgtactaaacactgataaaacgacagcaatttttttataagaaatgttcggaaatagttcatgaaaaaatgaagaacacgcagtgatcagtccgacacttgtcgtcagacacgccactgtaatcattaagcccaataagattgaaccataagaaccaaaataataggatgaaaccttagccaaaacctctgctccattttctaaaatccccagttcttcaacgctggaagcccccatataggaaagggctgtatacataactgctaagagtacagctgcaatcgcggctgcttttgcacaaacacccatcagctgttttttggtagaagctccttgttctttcaatgcattcacgatgataattccaaaaacaaatgctacaagggcatccagagtgaggtatccttcctgaaatcctttaaaaaacgcttgtgatgtgtacccttttgatggtgcttgaatggttccaattgggcgaataagagctaccactacaagcaatccgataaatgtcagcttaattggcgtcaaaaatttcccaactatatcaatgatttttgaaggattgagtgataacaagcatgccaatgcgaaaaataatattgtaaataagattaatgagacagggcctgcatcatttgataaaaaaggttttaccccaatttcaaacgatacgtttcctgatcttgggatagcgaaaaaaggcccgattgccaaatagagaatcgtcgtaaatacaatgccaaacaccgggtgaacacggctggctaacgactgtaagttttgtttacccgaaaaaacaaatgctgttatagccagtaacggcaatccaactccggtcactaagaaacctgcattagcgacccatacatttttcccagccatttgaccaagcataggcggaaaaatgaggtttcctgctccaaaaaacaatgcaaatagcattaatcctataatgatgatataggaagcagacactttttttgacattatatatcctccgattaaagtagacacttcttgaatagccaggaaacattacagatgctatttgcactggcgcagtgttgattccaaaataagtttgtgtcagttttatatatttttatcaagttcaacaaaagcatgatcattttgatcgtttccgatatcggttaaaaaaccaattgcaccaaaaccatataaacaacggttccccccgctatggaaagaagcatatttttcttccacaagtgaagcagtacaactgcagctgctccaaccaattcaggaatgccatgactttcagaaagcagactcacatcttttaaacaataaatgaccaaaagcccgattaccgctgatggcagcactttaccaagatattgtacatatttcggtgtcggtttgccagacgggaaaatcatgaatggaaggaaccgtgtcagcattgttccaagcacgaccattgcaatggtgatcatttgctgcgtcatagtcatcgtcatacggaaacctcagctttctccaatggttttctcagaacagtcagtacccctaaaatggcgagcatagcaggaataataaattggtttccgccaaaaaggataagacaggctactgaaagtccaagtcctgagagagcactgtaatgctttttctctttcatccattgttctatgaatatcacaataaacagagcagtcatcacaaaatcaagcccttcggtattaaacttcacgtacgacccaaaaatacctcctatcgctgcccccgcgacccaatataaatgattaagcagtgtcacaaaaaacataaaccagcccttgtcaacattcgccggaacattagcggtataattgatagaaaatgattcatcgcacattccgaaaatcagataaagctttttctttccagtccccctgtacttatccaacatggaaattccataaaacaaatgccgggcattgaccattaatgtcaaaaaaagagcattcatagggttgaacgcaccaagtaaaaaattcgctgcaacaaactccattgagcccgcaaatatcataaaactcatgatgattggatagattgcgctaaatcccaaagaatgcataaagattccataagctatccccaaaaataaaaaccccgcaaaaatcggaattgtatatgggaatgcagaacgaaatgcagcccatatttgacttctcttattcatatgagtgtttatagcaggagagcttaaatgtaacgattctttatttttattcaaatcaacaacctcctacatttcatcaattggcacacttacagttcttttttctgtactcatgactatgcttgtgtcaactccactaatagcagggttctgcattaatgaatcaatgataaaattccgataactctccatgtccttcgccacaatcttaagcatatagtcatggcttcctgtaagtgtgtagcattcttgtacctgtgggaatttgtttatatcctctaaaaatgaatgaattgtctccctatttaagggtgataagttgatgagagctagtgctgtgacttcgattccaagttttttctcatcaacaatagtcgtaaactttttaattatacctgcttctactaggttctttgttcttgcaaggcaagctgatggtgaaagcccaattttcttagataaattcagatttgatattgaagcatcttcctgcaattctcttaagatggccttatcagtttcgtcaagcataatacccatttcataacccccaatacgacttaacagaattacatttcatccgatttaaacaataacgaattttcattcgataatcaaatattttttaaatttaattccttttaaaatattattcacagaataaaattatccccatgattacctcataattaaattaacttacatcagaaagaagtcatgggagagttatgtacttgtgtgacttgataccaacatcataagaaacttatcagaagccaaaaagttattgcggtctcaccgaaaattgaatttgcggtgccctattgcctttttctgcgaacaaaaattgttaaaattcacaaaacagaaagtctactctattattattttaaattcgtcctctagttcctcttgagcctcttgtaaaacttctaatacatcatctgcgtatgaacctaaaaatgtattgctgaactcaaaatttttcaagactaaagtgagcggcaaatccacccaccctgtcaggcaatcccataaagcgtctaaatttctcccatagtagtctgggaagtctagtttatcttttaaaacatcatgtaaaacttctatattttcaaagtctcttccatctatcattatttttctcattagaaactatgccctccattattttatcttaacaaacgttttctttgtaacagctgtttgtccaaatgaggctgaaaacaaataaaaaacaccgatagggggaaactattggtgtttacaagacattttcatgcccggtaggcataaataatgctaaactttgtttttgaaaagctatcatatcaaatttttatgttacagcttttactatcgtttaatctaattgaggagtaaaacgaaatatgtttgaaaatcacatatccccaaaaaattaaaaactaagcggcagttcttcgattgctctcatcagaaaattccctttccatttcatttgttccttttcgccttttaactgtatatttggacagcggcgtaataaggtggaaatcgcaatcttggcttctaagcgggctaactgtgcaccaaggcaaaaatgattgccatggccaaaagcaatatggcggttgttctttctttcaatatcaaatatgtcggcatttggaaatatcttctcatcacggtttgctgatgctaaagaaatgatgatcacatctttccgtttaatctcctgcccatgcagtataaacggttcagccgtccagcgaattgtcgttagctcaactgggctgtgaaaccgcaatgcttcttctatggctgaattcatcaagtctggctgctggcggagcttttcaaattgatcaccgtgacacatcagagcatatgtcatattggtgattaagtttacggttgtttcatgacctgcaacgataagcagcataatcatcgagtacaattcttctgtacttaattgtgtgccttcactttccgcttgaattaatgcactgattaaatctcctgcaggttctctcctttttttgcgaactaaggattccagatattcaacaaactcccctaacaagtggtcattctcctgaagtctttcaggggcatctgaaaaatcaataattacttgcgaccacactctgaatttttgacgatcttccaagggaatgccgagcatttcacttatcacgataatcggcaatggaaacgcataatcgtctactaggttcatgaatttgttgggctgcactttatccaataaagaatctgcgatatgctggattttgtcttccaactgcaaaatcatccgatgcgtaaatgctttttgaacaagagttcgcaagcgattgtgatccgggggatctgaattaagcatatgttttgttaaagactcttcattcttcaatagagcaggacgtttttcttttgcggtaaatacattttcatagtttttctttaatttttcattctttaataaatgtattgcatcatcatatctcgatatgagccagcctttccccagagatcctaaagataatgggtagagaggctgtgattttcgcaattctttataaaattcatacgcttcatctttaaatgctctcgaagacaattgactttccgtcaagatggttacactctttttttcttttgaagacattcattcgacctccatctttatgaaaggttatgttaatctttaaatatataatcagtacgatttgtaaaatgatctattgagatcagtattcatgctaagggccaaaatgccgcccccgcattttgaaataaaaggtatgagacagtcattaatcattttgctgcccaaactctttccctgataagatggcgaaactcctaatacttctaaataccatgccggctcttttaagtatttggaatattttccaacttcattagtcacagtcactgtcaacatgttcaatactgaaaatcctcccattttgattaatgttatcccccctgctgctatataatcgatcaagttaatgtcgggtttatcacgatgttttaatagagcggcaacaaccatttcaccattactgaatgtcaacaaaaaagaaatgctttttaaaatatgctcttgtcagtactttatgcatttcaaaaataaatgaatgatctttttttcgcgttttacgagtaaatccataaaaggatattgattgaaagattcatggagtagctttgccacttagcttattcatctgccctagcttgtcgataaagaaacattgatacatctcctctgagcaagtaaagaaggaaatcgaattaaagcgcccttcctattggaaaggcgcctgccgttttactgtgccaaaatgtttttcatcagtgagtttttataaaatcatttattaattgatcagttgtcaatattgtggcaaattcatcatgcaatgtagctagagatatattatgaatagtcgccgcatcataatatgtatcattttggtctctcattccgaaggctgctgttgcatctgaaatcaggtatgtatcaaaccctaaattaccactcattcttgtggtggttgatacacagtgaggcgtggttaaaccagttatgactacagtgtttatttcatttaattttaagaattcttctaaattcgtaccaataaagctgctatttactgtcttggttataatgacttcttcatccataggcttaactatttcctttatcgcaaacccttcattctttggatggaataaagaatgaggtttatcagaagtgtgttgtatgtatatgactgtccatcctttttctctccataattttagtattttactaatattttcttccgcctttacgttattccgttccccccattttttatcatcgaaggctttttgtacatccacaatgattaaagcttttttcttttcttccacaagataccctcctacgtagaatttctatttattactacattctaaatacaaattttacttttgtacaattgtttaatgatgaatttcgaatgagcgccttctttattgaaaaatgcgttctaaactgcaactgtgcccaagccgttaaccttcaataatctaatctgagaatcactggctctacagagaatgataaaaagcactctaataacgagtgccgaaatgaaaaactattgatttagaagccatttgatacgctcagctgaaaagatgtagtggagtattattagacataaaaagacaataccaactggttttaaatgactaaaataaagcgctgcaacagccagtgcaaagatcaataattcaataactagccttgttaccccgtttacagctattacagtttgtccacttcgactaggatcattaggtactgcaaatacagaccagacaatcataactgcaataggtaaaacccaagttaaaacatatttaaaataaccattaaagcttatccaagcaaacacccctaaggagattagtgcagccatttcaagggtgaatcttaaaagtaaattagtctgattcagtttttccaactcctctataaaaaacacccccgcaggagatgctctttctctgctttatttcagcgtataaaaacttttctgttcttcctatttagattctattgtagttttcggcgagattacctctacttttgaaaagatgataccgactgctgctgttaccaatgctccgataatagaacgatgataagtataatgaaatatgacaacttttcccctcctatccagttaattatccaaataatcaggaagttgtctacaatttgcagaatttgtcgaacgaagtaaagaatataccataaaagctgaatattgacctcgcttatcgctgggaggctttactcattgtatgaattacagtaatacactaccttcccttttgagaagacgttcctctcttatatccatttgttgcaacttagctagactcttccaataggcttccttttggcgcagctgcttctagtcgaaattgagcaacacctgaatgtttcattggaatttctgaaccatagatcgttgctgaatttgttgcaaatgcatacataggagtagtcgaatggtggttgaaaaatgaaatgaattacccacctccagtgatggcagaaaaagcgggggttttgttagagaggaatctatagacatgtgtatctagaagatttgacagcattaaaatttatacttacatcgttgggaacaggccaacaataaagcggaagaacgtagtcatttgaagtggtttggaataaaaatgattcgaatatgttcttatcattgataaacgaacaaaaaaagaacatgttttgaaaaaagattgatcaaaacatcttcttatatgttgtcatagcgtaactttttataaaaaggttgattacattttcggggcttccaaaccaaattttgcccattcttcttttgctggaccataaatacctgaaacagttaaacctgcttgtctcataagaacagtcatttgtccccgatggtggttttgatgttgaattaaaaacatcaaaagtgaaccgttaggcaattgttgtccaataaagttgatacgttcttgaagtgtatggtcagtccattgggtttttaatgcctgtacaaatgcattactggcttgatgatagctgtcagctataaactgagccgaagttggaacaggataatcttcagctggggcatggaacgttaagtctgtgtttgaggtaatgatgcgaatagcagcaacagtgtgccaggcaatacggcctagagtccaattttgtgaagttatttcttgattaagtgattcatcagtcagactatttaatagtttctgtgtagcatctgcttcgaactcccaagatttcaaaaaatggtctaaggtttgaaacacaaaaatcctcctttttattcttttgttttttcaatgtgcctataggttaattataatgcctcgtttcgttaaaaagaacaaaaattttggacaagaataatcatagtaaaatgcgtagaccttcttaaacataacgatttacgcatctttttacaaacatggtgactccttggtctccattgtcagcgagaatcaaatatcatatgaaaacaatcctatattcttattactttactgagcaataaatctcttcggtatacttagtgatgccttcatcgtaatcaggatactgatatgtaagactttctgatacagcttttgaatactttctaaataatgcatagcaagtaaataaagacttccacatttcctgatacccattcacagaatatgtagacatgagttcctcccattctttatttgaaaggtaccgtttcataaatttatagttcttccccatactaaatgaataccctttctgagatgcgatatgccaggccatcattctcaataaattaggacgtacaatttcatttaaatggtcaatggcaaaaaggatttcatttcttgctagtccttttactacgtaagtcgaaaccatccagaactcattacagcaatcatcaaattcccttgcagtcggctttttcatccagtattggcgatcatttggggtcactttatagttgatgaacgaatccttatcgagcaagaccttaaccaaaccatcgttattagcaaaataatcttctgcttcacgaattggaataagggttagatctaatttgttcccatcctcaaaaagaatgatgtatgaaaaccaattacctaattcgggaggaaaaagctccatatcttctggtttttgcatcataatgcgcttcccaaagatttcgagccactgatcattttctttaaaagaatctacatcagttacaaaatacgagatgtcataatcttggaagttgtcaggagggatatttctgtttgtacgtgacccttccaaagtgaccaatcggattctctcatcgttcaaagcaaagtccaaaaaaatgtccatcatttcctgctcacttcgcattacatgttcctccgtttcagccttaatatctaactgtaaaaccgaatattgatctgtacgtcttatagatttttttactcttgaatgtgatgtattcttctaagctttattttacatgatgttctcctatatattattcaatattaagatgcaagacatctcaaaatcagatatcaactatgacggactacatgaatattcagttttttgtagagccgccatgggacgacactatctttgacacactttaatcccccctgctttatcgacatgttaactggtatgagagattgacaaaaagaaggaaaacgatatatttaagcgaatacgagtttttgagtaaattttaaaatgacacttttttcaaaaatcatgtcttaacggggggattcggtatgaatgaatttatgaagaagttttccttaacaaaaccgattattcaagctccaatggctggcggtattacaaagccccgacttgcatctgcagtttcgaatcaaggtgctcttggcagcttagcatcggggtatcttacgccagacctgctagaacaacagataaaagaaatgtttgagctgacagacgctccttttcaaattaatgtgtttgttccgcttggtctagaaatgccaccaaaagatcagattaaaaagtggaaagaaaacataccgttagctaatcaagtaaatcaattcacatctgtacaagaagagtgggatgacttctatcaaaaaattgatctaattttaaaatacaaggttaaggcttgctcattcacttttgatctgccgcctgaagacgcagtaaaggagctaaaaaccgctggatgctgtttaataggaaccgcttcaacagtagaagaagcattgttaatggaagaacggggaatggatatagtagtccttcaaggaagtgaagccggtggacatcgcggagcatttttaccttccaaaggtgaatctgccgtaggtttaatggctctgattccacaagcagcagatgcactgagcgtacctgtcatagctgctgggggaataatagaccacagaggagtaaaagcagctttaaccctcggagcccaaggcgttcaaatcggttctgcctttttaatttgtcacgagagtaacgcacatccagtgcataaacagaaaatactagaagcaaacgaagcagatacaaagcttacgacattattttcaggtaaagaggccagaggaatcgtaaataaatggatggaagaaaaagaacagtttgagacacaaacccttccgtacccttatcaaaatacactaacgaaggcaatgagacagaaggcttcacttcaaaataaccatgatcagatgtctttatgggcaggtcaagggatacggtcattgactgaggaaatttcggttaagcagcttttaaatcagctttgccaagaggatataaaaatataggcgcacctcattgatagagcaaaaagcaaacttcgacaggcagtttgcttttttttcgtaatttcatcccctgactttggaaatttaaatactcctacattttcaaagctaattgaatcgggttatcaatcatcccactgatacggtgcgatcttgatgatttcaccacaatacatcaccaacatttcgatcttatctccccttctccagttttgctccctattcgaaaaatcgatagctcccatattaaattcgaatagtaaaatggttctttttcgtttgattcagatgatataaagtcatatgataaaaaaagaatgagacagaaagcgtgagaagtgatgaaaataggattttttgattcaggaattggtggcatgactgtattgtatgaggccataaaagttcttccttatgaagattacattttttatgcagatacgttaaacgttccatacggtgaaaaatcaaagattaaagttaaagaatatattttcaatgcagctgaatttctggccagtcaaaatatcaaagctctggttattgcgtgtaatacagctactagcattgcgatagaggatcttcggagaaacttcgactttccgataatcggaatcgaacccgctgtaaagcctgctataaataaatgtacagaggaaagaaaaagagttctggtagttgctactaatttgacgcttaaagaagagaaatttcataatctagttaaagaaattgatcaccatgaccttgttgattgcttagctcttccaggactagttgaatttgctgagaactttgattttagtgaagacaaaatcattaaatatctaaagaacgaactatcttcttttgatctgaaacaatatggaacgattgtgttaggatgcactcattttccgtttttcaaaaacagttttgaaaaactgtttgggataaaagttgatatgatttcaggcagtgtcggtactgcaaaacagttgaaaaaagttcttgcagatcgtaatcagcttggtaaaggctcgggctcaatcacctttttcaattctggccataaaattgtagaccaagaagtcatatcaaagtacaaaagattgtttgaaatattagatgaaaatcaaaggagtcatgttggacattgaatgtaaggggctctggttataaacaatttttcagtaaattcacaaaagagagaagtatgaattcgggtttgttatccaatgtaaatgaaaaagacagtctcatgaagaaaaacatgaactaagaagcgggcttaaaaagcccactttttttctaacaaacaattgagttatgcacaaatatctgattacagtgttttcgctctttcccctcttatttctaccccatctctatagcttttctatttcaataaaacacaagtctcgattgaaaagttatcgtaacatttacacttcacaggacatttttcgagattagaaatcgaccgtttgccagatacacaaagtcataatgtgtaaattctgtgtctatttgcatgtttattatggaattattttcataatgttttataatacaagatgatagcgttttctaattataatgatagggggaaataatgatgatgaaaaaaggactgctcgcgggtgcgcttacggcaactgtgctttttggcacatgtgcagtagatgtgccgggtattattagtccaaaaaccgcagaagctgcatcacagctaactgatggaatcggcggaagggcttacttgaacagcactggtgccatttttgttacgaaaatccagcttcctagctccattcaggtttcaaatgggacagcctacatctactctggctttagcgggggcacagaatccgatatcgggcttcagtacagtgataaatataatgtatggaaaccatatatgaaagtcggttcaaaaggacaggatcaggttcagtacctcgaaggaggaagccaattcacgaatacgaaaggcttccgtcccggcagcaccgtacaacttaccatctacaaaaaccttaacggcaatacacgcgctacatactggggcacaaacaatgcgggatacaacggccgtctcatttcagagatcagcaaaacaaatgtcggctccatctccaaatggaaagcgctcgctacagttgcaacaacaggttcacgccaatctatcaaatcaaacttttcaacatcttttacaaacatcaccatcgacaacaaagcaataacacctgtaattgatacacaagacttcgctaaagtaacagtctcaggcaacagtgtcagtttatccgttgtgaaaaattaaaacatgttaaacatacaatgcgttaggctattgagaagctctcgatagtcttaaagggggcttaacatgccccttttttcatttcaatttaactttcagttagcttcggtgcatgccgtctatccccgtcttttatctgggtgaagtaaggagcagctcgccccttctgagcctgttccatttgctcaacgcaaaaggtgtgcattactgtcttaaaaatgttaaaacaaatggcagatggtgcactttatttttagatgaggcatgcttacgctcgatatgcaagtcaaatgattaagggtctgcaagagagagaagttttgggtgtactttcataaaagagggatgtcttcatatagctcgattgcaccaggaacattaaccagcgattggccgagaacaacacatcactttgaaacggattcattccaaaataataagtatgatcaataactaataaagatcagttagcagtccagccttaaaaatatttttacatcaagtaaactagcatcactatcgaataagctcgatctgcatatcatgtactatcctcttttaaggaaggtgatgttatgaggtcatttccattaattgtagttctattcatcctattaatcatcgttgggacatctttctttggtggctattaagaacacaccttacctcatatccatcagacgccataagaaatctttatggtgtctgttttttattagatttaaacaaaaccattaaagtggggccatgcaaacacacctatggagattactgccacgacttctttgtgagggaaatattcttccctttatggactattgtcgatcaaaagagaaagttgaaatacctttttatggtgagatgaatcgaggcttagacatataaaaaaccgcaaagctttcttgaagaagctttgcggtctttgggtctcttctttgcttcatataagccaatagatttcaagcgtaatccactgccatacatccaatgattttttattttgaaataggtttcttctactcttcctgtgagatgactcaaggtatgccacgtcacaataatgtggcggatcctgagtggtctcaatcagttttttccccattctatcaattctccacagaaaaaatggctatggcagaacaactttcatagagtaatcatcatttaatgagccatcatctcatgggcaatatcgtgtccatccatttttgacgggtagtaggtaggccaatttttgacttcatcaagtaaagcttcacggtcgtccccccaatagagatgataatgactagctttagtcgggtaaatactatgatcactaaactgaatatactgaggcagctcttctgcttttttagctagtttgaatatgtatcttacccctctattgcccgcatcataggtgagaatttcgtacccgtcatacgtatacttaccagaatattcttttccatttttgaagaacgttacagtatctttctggattacaatacggtcaacatctgtttgatagccttttttataatactctttatattcttcagctgtcttgccgccttcgtgttctgatttatatgaaaacacttcgtcaagagtaccatcttgcaggtatggatatacagattgccaatctccttcccaatcagaaagtaagcgatcctttacttggctgtttttaaaatagccttcatatattttttctgtttcttcatcatgcgcatgactatgatcgtgagaatgttcttgtgtatgactgtcagatgtttgctcttgcgttttggaagagtcttcttcaactgctgaggatgatgttgtttgattagactcacctgcagaagaaccggaagtctgacatcctgccaatacgagtaatgaaccaatcgttaatatgcctagccgctttgaaaataaaatgttcattccaacactcctttttattaaatcgaaaacattacgatttatattatacatacatctcttgcaaacatcaaagggaaaatgctcttcatgcggatggactattttaaaggaataactgactttgttcatcagttattcctttaaaatacgaaagtctacgatatttccatatcgatccgcttcaatattacagcacccctcaagcagctgttttaattttccccgtccgcgttgtacccttgattttgctcctgagtaagaaatgccgagcttttcactcaactctttctgtgataacccctgaaattcagttaactcgagcgcctctcgatacttttcaggcaaccgtttgatggtcgatcgaatacacacagttgcttccttggtgaaattttcttcctctgcacggttattaaaatgtagatcatcaggcaatatttcgcttgttttttttgtacggtaaaaatcaataatcgtatttctagtgatccgataaatccagctgtcgatcttttgttcatcgatcagatttgggagatgcacttgtattttcataaatacgatttgcaagaggtcatcaacgatagattgatcgttaaccctttgtgaaatatatgtttttaacggctgatgaaattgatcccatagatcctctatattcatttgaaaaaacctcctataattttgcgtctgctttacatttgcttcgtctttttaatcgtaacaaagagcgaaacaattgttgaatcaattgtattgcagctgttgcaaaaaataatgataaaggagaggtttgttgtggagtatacctatttagggagaacaggattgcgggtgagccgtttatgtttaggcacgatgaattttggagttgatacagacgaaaagactgcgttccgtatcatggatgaagcgcttgataacggcatccaattttttgatactgccaatatttacggctggggcaaaaacgcaggattgacagagagcatcattggaaaatggtttgcacaaggaggacagcgccgcgagaaagttgttctggcgacaaaagtatatgaaccgatttctgatccgaatgacgggccaaatgatatgaggggcttgtctctatacaaaatcagacgtcacctggaaggatcactgaagcggcttcagacagatcatatcgaattgtaccaaatgcatcatatcgataggcggacaccgtgggatgagatatgggaagcttttgagactcaggttcgctccggcaaagtagactatattggatccagtaattttgcaggctggcatttagttaaagcgcaagctgaagctgaaaaacggcgattcatgggactcgtcactgaacagcataagtatagtttattagaacgaacagctgagatggaagtgctgccggctgcacgggatcttggtttaggagtagtggcgtggagtccccttgcaggagggcttcttggcgggaaggcattgaaaagcaatgccggaactcgtacagcaaaaagagcagatttaattgaaaaacatcgtttgcaactcgagaaattttcagatttatgcaaagaactaggagaaaaagaagcaaatgtggctttggcatgggtgctggcaaatccagttttaactgcgccgatcatcggaccccgaacggttgagcagctgcgtgatacgataaaagccgttgaaatcagtctggataaggagattctccgcatgttaaatgatatctttcccggacctggaggagagacacctgaggcatacgcctggtgatacattcattactcaatactgacatttttcttaaatatttatactgaactatcatattaggaaagacaagagcttgtttgtctcttgtcttttccacatcatgttgaaaatgctggctaaacatcgacaaaaatgctgccgcttctaaaaaagaaccctaaacaatagagtaactggaaagacaactggcttgatcagcttgggacccctttcagctgtatttaaatcaatcaaactaatgattcattggcagtctaaatattattattgtttgtttacaaaatagtaatagcccctgtaatgattgctaacaacgtaataactaatgatgtaattacagcccacttaacggcaaacctttgaaatgaccccaagtccattttaagcatacttactaacagtagtgttgacgcaactaatggactcatcagatgaaccggctgccccattatagaagccctcgcaatttctactggttctataccatatgctgaggcagcttctgcaaagataggtaccataccaaagtaatatgcatcatttgataaaacaaaagtaaacggaatactagtgagtgctacaataacggggaaaaaccctcccattgatgagggaataacggatattaatgatcctgctatggcatccaccatctttgtcccggataatataccagcaaatactcctgctgaaaataccaataatactacagttatggcattaccagaatgctcggcgattcgctccttctgcatttttacattcggataatttatagtaagggcaagaacaaaaccaattaaaaataaaactgacggatgcttagttccaagcacaataaacaccatgatacttataacgaggaataaattaagatatattaagcgtggccttttcaattgctcgctctccaaactagcagccatataagattgagagctgtcctttgttatatgtctaggctctaattgaacgatgcctattcgattcctctctttccttcccattagaaaagccagaaatatcacacaagcaatacctccaagcatggtcggaagtaatggcacaaaaaaatctgaaggatccaaacccagcactgaaatcgctcttgtagctggtccgccccatggagtcattccgctaacgatactcaacgacagcattgctaatgtcgccataaccatgggattcataccaattcttttatacaaaggtaacattgctgagactgttatcatataggttgttgtaccgtccccatctaaagcgataagcattgccaagacggcagaccctatcgctattttcacagggtctccctttactatagataaaattttttctattagcggatcaaataaacctgcatcaattaaaattccgaaaaaaagaatagcaaacaatagcaatgccgctgaacttgcaactgtttgaattccttctaaaatcatgtcgccaatacccttaccaaaacctccaataagagcaaaaacaatgggagtgatggtcaaggcaacaataggcgagactttctttgtcattattaatattgtaaaaacagttaccatcgaaaaacctaaaatagtaagcatattacacctccaagaatgcgctttcaaatgacttttgattaacatatcttatacggtgtaataagttaaataaatatttttttactgtgtttcaaaaaaaattctatcataactttaaatggttaccatttgttcaccctttaaaaaatcaatgaatgctttaacgagtttgattcctaatgatttttgatcgtacattagccaagtatctctcattagaggcttacccttagcattatacagttccattgtgtacaaatgatcagattcctgcaggcaaatttctggtgctatggagtaaccaagaccatgctttaccatctctttgcaagtctcttgtcgatccacttccattgcaataatgggggcttgttttagattcgtatgcatccaatcttctataatcgtttttaaagaagcatccgttttatatttgataaaaggtaaaaaaggaagctgctctatcgttattggtttttttgagatgatatgtaatttttcccgtgtcagccgttcctccacccctttccagcgatggcttcctctcagtataccgacttgtacaataccagcatctaataatttcatgacatctgtgctccagcctgtttgtacactatattggacattaggatacatagtggaaaattcccttaataacttagggagcttatattgagcgaaattgcttgatacccccagccttagatgtccttgcacctctttgcttagattagagatatgatctttggtatcttgaagttcctgtagcattcttcttgcataagcaaccaagtgttctccttccgcagtaaaggtaattcctttatgccttttggtgaataattcaattccgaaaatctcctcaatcttattcaaccgataagtgatggaaggctgtgatgtaaataatcgttctgctgtttttgttacactttgttcttcgtgaagaattttcaataaaatccaatctttctcatccattttcatcttcctttctagtccttctttcacaattataaaagtttttttatcgaatattaagaaaacttatattttatttttatttttttaccttctacactaaaaaacataaaaaatactacctttaagatgaggatgatgacgatggtcaagacgaatgtaacaatcatgagaggcggaacaagcaaaggcgtttttttccacgaatcagccatgcctaacaataaaaacgaatgggagccctttttgcttgatgtcatgggaagtcctgataaaagacaaatagatggtttgggtggcggtaattcccttactagtaaagtggcaataataaagaaagcatatacttcggatattgatgttcactatactttcggtcaagtcagcatttcggaagaaaaggtggactttaaggggaactgcggaaatatctccgctgctgttggtccatttgctatcgaagaaggacttgtaaaagcgacagaaccaatgactgcggtaaggatcctgaataccaatacgaataaaatgatcattgcggaagtggaagtggaagacggtcaggtcaaatatgacggagatgttacgatatctggagtgcctggatctggatctccaatctatttaaactttcatgatgccgctggttcagttaccggtcatttattgcctactggaaatagttcggagtttttagatacaagtcaaggccaaatagaggtgtctattatcgactatgcaaatccattagtttttgtggaagccagcagtatcggcctggagggaacggaacttgcagaagaatttactgatttacagttggctcaatttgaagaattaagatccattgcggcagagaaatgcggctttgccagtcgattttcagctacaaagttatcgccggctgtccccaaactggctatagtagcaaaaccagagaaatataaagatagtacaggtgcttggcattcaagcgttgagatggacttacacatcaggatgatgtccatgcaaaagccacatcaagcactggctgtcactggagcgatatgtacaacaagagccctttcagtggaaggtgcaatccctgcaagaatagcaaaaaaccactctacaaaggttcggctagctcattcttctggtattattgaaacaatggtggagcccactggtataaagatcgtccgtaccgcacgacgtattatggacggaacagtttatacgcatggagactatcaaatgatgtagatggactgtgcaaaaagcctccccctttccatcgttaatagatggattgaatgcgccttcttgcacagatccattgtaatcttgcatggctttaaaaaagcctctatattgtattttatgaaatcgccaaggtcctttcatgtatctgcctcaagcatgacataatcattatagagaaaattgaatactttttactgcaaataaaaagataccaacatcattggtatcttttagattgagttcatctgcagcggtttcttttcctcactgcttatttgattacaaaattaccgtactcgtttgaacgaacatgaatcggtccgtttagattatagttgttctccttggcgatagagcgaagcacgtccacacgggcaactgattctctccattcgtcacgggtgtcatgattggccggattcatcagatcgtcatagcgtacgtccaagaatttattcaaccacttcttctcgtctattccgtctttaggtgatccgcccgcttttttgttcgtacgtttaatcaaggcataaaaagagtcagggtcatcaccatcgccatgctgaataaccgtatcgtacatcacagctctagccaatgctgtttttagtccggcattatccgatcgtttcatggcaggctgataatacaaatggtcatttactttgtcttgagcggcgcgaaattccttatcatttgcaagcgacttccaggcagaagcgaatcccttgagattgcttgtatcatcgctttcttccttggccagacggcgcaattcagtcagatactttttcagtttgttattcggaactgcctttgtgtatacttctactacttccaatgcatccccggtagccgttgtaaagcccgcccgtccgcatgtatagcctcgcccgtcatccaatcgctctacatatccatattggatctccgttgtgccgttttcaaagatacttgtcagctgttccgcccggcgcttttgatctttattcagtcccgccgcaaaaaccgtttcgctcatcatcagggtaaaaaacatggtgaaaacaagtaatgagatcgctgcttttttccaaaaatctgctttttgcatactgattttcattttacttcccctttctaaatattgtaaatacagactcagtatacatgatgaaactgccctattgttgaaaatacatcaatttgtaaatattttgaatctaaagtaatatagcttgaatcttactcttttcattgccaatcagccttagcccctctcactgggaaggtccctttcatactgcttcaactttcattaacaagatgccataggctttactctattttataatggaagtgatcatcgaaaatcgttagggaggtgatgtaaatggcaagcaagatgagaatgccagattccgcaacgtcccatgcaaagcctactattgggaaggcgatactttgcatggggtagactttctaaaagatcgcccaagtaagcttttctgatatagtggctttgcaccttatttgacataaaaaaataaggagctggcagaaatggcatatgtaaaagcaaccgctattttacctgaaaagctgatatcggaaattcaaaagtatgttcaaggaaaaacaatatatatccctaaacctgaatcctctcatcaaaaatggggtgcgtgttcaggaacaagaaagctgatcgatgacagaaacgcttctattaaaaaagcatttaaaaacggcaaaaccattcatcaattatctgatgaatatcacctctctattgaaacaataaaaaaaattgtctactctaaataaacaaaacggaagcactgataaaaaataatcagtgctttttatatggcgagtttgtttcttagttatttcctgcatatgataccattggccaattgtgtaaagttaagggagatgagaagaaaggaaggtcctacaaatgacgataaacaatggaacgttgcaagtacccggcgcgaacatccactatcaggtgcgtggctcaggtccaatcattcttttggtccacggcggaggcggtgatgccgacaagttccatcatgttgccaatcatctggctaactggtactcggttgttacttacgatcgccgcggccattcccgcagcaatctcgccaatcagattgaggattaccgtgtggaaacacacagtgacgatgctcaccgtcttctagccaaaatcaccaataagccggcctatgtatttggaagcagctccggggctgttatcgggcttgatctgtgcatacgccatcccgaacaagtacatgtcatgatcccacacgaaccaatcttattgcagcttctgcatggaaatgagctgaaacaagccgagcaattcatggaagaccttaagaaaaatcatcaaagtgaagtcattaagttcatgtcaagattagagacagacgaacaatcaaaggctgtgctgacaaagcggcttctcggcaattcaacgtatttcactgagtatgaaattcaaggaattctcagctatacattagatttcgaagcattaaaaactgtgtttacatcttcaccgatgaagatactcccagctggcggaagtgcttctcgggagctttttccttatcgttgcgcgaacgccctagcggaacaattggaaacagaatttgttgaattccccggaaatcatacggggtacacaatgtaccataaagaattttctgagaggttacacgacatgttagaaaaagaaaataaacatacgtgttcaaaataggacaggtaaaactaactatggaattggagaagatttcacgaagcgtaaaaagaacttttcactaacgagaacgcaatgtgagatgtttaaccaaagtgatattagggatttcatcgaaaaataggtttgtacattacgttctcctattgattatttcctatcttaattccgtattttataccattagatacaactctaaagcggctcgttattttgtcctcaacaacaaccagtgtctaacatcatgaatctcttttgaaaatcaccacaaatgcaggtatggaagacttcatcgcagcaaaaaccataccaactattgttgttggtatggttcgtcctagataggcccttaagaagagattctattgtacggagtatttagctaattgcatttgtaaccgacagggccgtctgaacctgtgtacacatatgtgtcagacacatatccaatattcacgacaccccgggaatctttccactggatttggtcccagatattactcgttccatacttccctgtaacagtcgttccataagcgtaacaataataaggaacacgggagccactcggaatggaaagcataataggataatttgtaccaggaccgctgcgcatattgacaggcgcaccgctgcttgttgagacagtaaagtactgcacggcaagtgcctgactggaaaaaatgaataaagatgcaatcatcacggttaacatactcagcattttcagtttagtcaatgtcatccctctttcttcaattccttcattttaagaaacgatagaacaatgctaccagctgcatttaggaacaaccggaccgtctgagcctgtatacatatatgtatcagagacaaatccaggaacgatctccccgctggcaagcgtccgctctgtgtaattccaaatgttactcgttccatactttccagttacagttgtaccggttttgtagcaatagatcgggatgcgggttccgctcggaatagtcgttacaattccccaacttgtacctgggccgctgcgcatattgacaggagcaccgctgcttgttgaaaccgtataatactgagctgcaagtgcatggctagaaaaaatgaacacagatgcaatcatcaccgttagcatacttagcctctttagcttattcaccttataccctccccttataaatgccgtacgtttgactttcttacatccagttaaggatttactttcagataccatgccccctcccctctcatatatttatcaatgtaccataaactagatctttcaaaagtggaattattcctatgttttcgacaattaaggatacaaaataaatggtagtcaggcttgatattgatggtgtgttacatttggcatttgtccagtcggtaatcacgattgacaatcaggaaaaaggacatggatcaagcggtttcgtgtccaccaattaactcaatcagtgtacttctgccttgtatccacgcttcttctcgattcatagatactccacctttttcaccaatcaaaaacggacaccaaacaaatcagcgtaaatgctgcaagttcagtgtccgcaacctattatgactttgctttcttttaccagggcgtataaaaatgattaggtacgttatcaaacgttatattctatgattttgcgagtcgaaaaatcataacattttatatatttcaatcagattatgatctggatctctgaagtgagcaactcgggcactccattccttgcgatcatgcggtttatttacacatttaactcctttttcgtgtaaatcgtcatatgttttatcaacatcttctaccttaaactgaagcaaaaattttgattgagcttctccttccaacgattttttttcctctccaacgatttcagccatcgtttcacgagataaaagctctattttcgtttccccattatcaaagagtgcatattccatttcattctctaaccaacttattggaagtcctaatgaatctttgtaaaactccacgcttttcttaaaatcattcaccaacagtctaatttgtaacagcttcatatcgagtgcctcctataaaaccatactttttactggtcatccaatttaatgatacaaaaggaaacctgacagcactatgtcaagtttccataaataaatttcctacttcacctttatttcagatttaagtgcagtttattccatgtcataagaaatgtacgctaacgagcaaaaacagcgattcttaaaacaaaaaatgataccgagtgtattttctgtatgcttcaacttcatttcgggaaatgtaacgttgataaaggaggttacatcaatatggatcatcaaacattggcagctcacgaggctgttgacttacatgaaatcgtgaactttaaaacactttgtatagcgaaatcaaagttaatgcaaggacttgtgtttgaccaagaactgaaggacttgatgcaaaaagatgtacagcaatccattcaagaccttactgaattacaagcggtttatgagcgtgcctcatttcaggcccctgtccctcaaagccgcccaacgccaatcatcaattgaaaggaaggtaagcctctttgaataatgatcatttagaccccattaattcgctgaatgtgcctgaactagcagacactacattcgcgatggattttcttatacgagctaaggaaggcgtaaggaatactgctgtagctttgacagaaaccgcttcaccagatgtaagagccttgctgcggaaacagctgatgcaaggaattgcaatgcaccaagagattacggaactgatgatcagcaaaaaatggttccatccatatgagctgagcgaacagtataagctggatcagctctctgcaaaaaacacgatcatggtcggcaatatgaacctcttccctgatgaaacaaatcgtaaagggatgtttgaccggacacctgatgaacactaacactggaggttttacagcatgaaggcagtaacgtatcaaggcattaaaaatgttgttgtcaaagatgtccccgatccaaagattgaaaaatccgatgacatgattatcaaagtcaccagtacagccatttgcggatcagatttacatttaatccatggattcattccgaatatgcaagaagactatgtcatcggccatgaaccgatgggaatcgtcgaagaagttggttctggggtgactaaactaaaaaagggagatcgggtaattattccctttaatatagcatgcggggaatgctttttttgtaaaaaccagctggaaagccaatgtgatcagtctaatgacaatggggaaatgggtgcttatttcggctattcagggcaaactggcggttatccaggcgggcaagctgaatatttaagagtgccgtttgcgaattttacccattttaaaatccctgaatcttgtgaggaacccgatgagaaattaagcgtgattgccgatgccatgaccaccggcttttggagtgtggacaatgccggcgtaaaaaaaggcgatacagttatcgttctcggctgcggaccagtcggcctgtttgctcaaaagttttgttggctaaaaggcgcaaaacgcgtcatagcagtagactatgtaaactatcgcttacagcatgcgaaacgtacaaacaaagtagaaatcgttaattttgaagaccatgagaatacagggaattatttaaaggaaatcacgaaaggcggagcggatgtagtcattgacgctgttgggatggatggtaaaatgagcgatctcgagttccttgccagcggcttaaagcttcatggcggaacgatgagtgcattggtcattgcttcccaagctgttcgcaaaggaggaaccatacaaattacaggtgtgtatggaggcagatataacggttttccgttaggagatattatgcagcgaaacgtcaatatacgctctggacaggctcctgtgatccactatatgccgtacatgtttgaactagtatcgacaggcaaaattgatccgggagatgttgtcagccatgtcctgccgcttagtgaagccaagcatggctatgacatttttgattcaaaaatggatgattgtatcaaagttgtgttaaagccttaaaaaacggaggttacagaaatggaatacgccttacacgaagtgcttgaggttcaggaaatgactgcatttaagacactttgtttgacgaaatctaaaacaatgaaagcactggtatctgatccgaagctgaaagaaatcatgcagcaagatgttgatatcaccacacgccagctgcaggaatttgcctctattttatctaatgcaaagcacgaatgaggagatgaataaatcatgaatcctatcatagaatatctgactggcatgaatgttctaacagaccaaatcattgctatggacttattaatttcagcaaagaacggagtcagaaattatgcgatggcagccactgaagccggaacgcctgaagtaaaagaggtccttatccgccatttggaagaagcactcgatatgcacgaacaactctcaagctatatgatggaaaaaggctggtaccatccttggaaccctgacgaacaagtcaagctgaatttaaaaaatattgatacagccattcaattgccaaccctttaacatacaatgactgatttgctgaggaacagtattgattggccacaactgttcctcagcttcaaaatgagcactgtttgttcgggtcctatgaccgtaaatagattaaccgcttttctccatctgatctccgataatgtttgcaaattctccaatccaaataaggaatcgtaaccacctctttttatgcgatctcttgatggagaaaacaggccagaaacaaaatccttcgtttttgacctgccctcttcacacgcaaagaatgctaccttctttgctccactgatccgtgaagactttccgttttaggcctgcttttgagctttgcctcattttcacgcaatttcccatcataatctttaatttttgtgtctaatctcttaattgtttcatcaatttctttccgcttctctatcagccgctgtcgttcgtcagccaggatattttttcgagcttctaccgtacagtcaccttcggtaaataatgttgtatattcaattagcgcttctatcgatagtcccgcatttcgcatgcatttaatgaattcaatccatttgatatcttcttcatcatagtcgcgaatgccgctgtcttttcgttttacaggcgggattaatcctacacgttcgtaatatctgagtgttgcggctgtcaggccaaactgctttgccacctgagcaatattcatgatcttcacctctctatcctgcatgttgtgaaggtaacacttaaagttaactttaagtcaagctcaagacaagtggttagctgctgaatctgggtttatatattcgggacttgccttaaagcacactttaagctctatacttctccatgcaataaaaacagtgtagatggagggattgctgaatggcaaataaacaaactgccggaagagaacaaaccaaagtttgcttaacttcatgatgatgttctattcggtgacatttgggaaagagaggaagaacttccccccgagatcgcagcataattacagtttctacgttaattgctgactgtatctcaacttataaatcaggttcattttaaatgttattttaaaaaaacccttgccttaaagcagactttaaggtttatcgttatgttgaagacaccataaaacataaataagtgcatgtttttttacaacacttatgatgaagaaagggaaggttcatatgtgtaatcaacatcaaacccgtgtattaagcgtgtcacatgcaaaagccaaatttgaacaaacgacgattgagcgaagaggattacggccgcacgatgtcttaatcgatattaaattcagcggtatttgccattcagacattcatagtgcttttgatgaatggggcggtggcatcttcccaatggtgcctggacatgaaatagccggtgtcgtaacagccgttggagcagaagtcaccaagtttgctgtcggagaccgcgttggtgtcggctgttttgttgactcttgcggagaatgcgaatactgtctcaacggagaggaacaattctgcacgaagggtgttgttcaaacgtataactcagtagactacgacggaaaccccacttatggcgggtacagccaaaaaatcgttgtcactgacagatttgttgttcgcataccagatcgtttggaaatggatgttgccagtccgctgttgtgtgcaggtatcaccacgtattccccgctgaaacactggaatgttggccctggtaaaaaagttgcgattgtaggcgtgggtggccttggacatttggcgattcaatttgcacatgcgatgggtgcagaagtaaccgttctgagccgttccatgaataagaaagaggaagctctggaactcggtgcaaatcattactttgcaacaagtgacccagctacattcactgcattggccgggcgttttgacgtgatcttaaatacggtatcggcaaatctcgatgtagatgcctatttatcaatgcttcgtatagacgggacacttgtaaacgttggagctcctgccaagccggacacatacagtgtgttttccctaatcatggggcgccgcagcattgcaggttctctagtcggcggaattcaagaaactcaagagatgctggatttcgcagctgagcatggcatcgaacctaaaatcgaagtcatcggagctgaccaagtggacgaagcatacgaacgtatcctccgaagcgatgtccgttatcgatttgtgattgatatttccacattgtaataggttattccttatatggggctgacccgcttttattgaaactcacgaaaaacgatctcgttaagcaaatattttgaaggccggtcaatcttcctgttattctatgaatagagagttattaggagggttttttatgagcaaaaaaatcgcagttcttgttacagaccaattcgaagacatcgaatatacaagtccagtaaaagcatacgaagaagctggctacagtgttgtggctatcgatttggaagccggcaaagaagttaccggtaagcatggcgagaaagtaaagattgacaaagccatctctgatgtggatgcaagtgactttgatgcacttttaattcctggaggattctctccggatttgcttcgtgcagatgaccgtccgggtgaattcgcaaaagcatttatcgaaaacaaaaaacctgttttcgcaatttgccacggcccgcaagtactgattgatacggatcttctaaaaggcaaagatatcacaggctaccgcagcatccgcaaagatttaatcaatgccggtgcaaactacaaagatgcagaagtagtcgtcagccacaacattgtcacaagcagaacacctgatgatttggaagcatttaaccgcgaatctttaaacttgttaaaataacgagaaggcacagactgttcgggtctgtgccttttttaaaattaagactccttctttacattctgaaagacagcagtcgcgtcccacacattcaagccaaattgaccttctgaaaatgcggaatcatttgcatcaatcacaaggcgatcatctaaatagattttaaagcgatcgccctcggcctctgttttcagatgatacttttgattaacgtctatcggtgttttgtattcagcaatgacagaagcaacaccgttctcaaatttaaagaatttcactagatcatgctttgcatccacattggcaaggtaaccgtttttggcatctttgtcagagcgaaacattagtgctcctgcccctcttccgtttccatccttaatggtgatatcagattcataagtgaagtctgacccggatgctgaagacaagataaaggaatctccgtccgacctcccttgtttcccctcaattgtgtcggcccatgtgccatttacagtcgtccagccagtcatattggacataaaaggtgacgttccccataccttttttaaagggtgtatggttaaagattttacctttacgccgccatttgcagcatataattcaagccctttgcttgatcggtctgggagaataatatccgttatgacctgctttccgtcattcccaaatacttcaaccgaggagcggtcaacaaaaatgcgcatcttaaccttcccatttaccggcttcaatggggctgtttcttttccggtgttaaaggccggattaaaggtattgttgcccgactcgctccggtcaacgaacaatttggcgttccttcggtcatagccgaccttcgtaaattgattttcacctgttcggaccttaaaaccaaattcagcagctgaaccagggcttactttaaattctgcatttatttcataggcatctccagattgccccgctaacacattatgacttgcaggcgatatggtcagattcttccacttcttagaggttccgcgaatggtttccagctctttcaccggtgtttggaccactctaaccccttcggtaaacgctttcaattttaactctcttggaatggacgttgcacttctccatggggatgtcggaacatcattcgcatattgccaattgctcatccaccctaaccatagccggcggctgtctgtggatggaatatcagaccaggatacagccgcataaaagtctctgccgtaatccgtccagagaactttgtttggcgggttttcatttttaaaatgagttccatcaaagtcccctacaaaatattgcatgcctgatcctcccgagaccgctccgtttccgacactgacctgcatgacccatttcttttgattcggattgccgtctaccggaagctcaaataaatccgggcattcccatactcccccgtggcttccttgatcctgtccaaattcacttgcatacgtccactgcttcagattttttgatgtataaatgaggattcggtcaccggccgcaagcaccatcacccactttttttctttctcataccaaaagacttttggatcgcgaaaatcttttttacccgggtttggaatgacagggttgccagcatacttcgtccatgttcttcctttgtcgttgctataggcaatactttgcacttgatggccttcccgatcctgtgtataaatggccacaagcggcttctctttgcctgtttgaaaaccgcttgtgttatttttatctacaactgcgcttccagaaaagatcgtgcctttttcatccggatacagcgcaacaggaaggtgttcccatgtaaccaaatctttgctgacggcatgcccccaatgcatgggcccccactgaagcccgtatggatggtattgatagaacaagtgatattccccagcataatataccattccgtttgggtcattcatccagtttgcctccggtgtgaagtggtattgaggacggtaatcctcatcatagtagcttgaatcggctgcatctgccgaaaatgccatagtcaacagcagggtgaacatgatcatgacttgaataagtctctttttcatttgttccttcgctcctctcttcatgtttgaacactttcaagagagactgctgcgcaagctggtccgtttctggcaattctcctctgtttcactgttatccgaatgatttatatatgaaaagactgctgcagtttctctctctttccttcacacaccttatgctaagaatccagcccaatacccgagaatcccgatgacaaagatgccgcaaataatgagaagtggattcacccctttgcgaagcatccatgccaccaataacgttaatccgagaggcagcgcccccggcataatgctatctagcacgttttgtaccgtttgaacatctacttttccgctttcatccttaatcctggatacaacgattggaatgttgatggtggtccatttggacacgagagcccccataacaaataacccgagaatcgaagcgccctctgtaagcttttgaatgcgattccccgctaaatcctgaagaatctccattcctttcacatagccatactttaatccgtaatattttgtgcttaatcttatggcattcagcaagaaaaagaatagcaaagggccggcaatgtttcctcctaaagcaagggaggctcctagcgcagctaagacaggacgaatcgttccccaaaaaattggatcgcctacgcccgctattggtcccatcaaaccgattttcattccgcttatcgcttttccgtcaattcctttattgttcgccatttcttcttccatggctgccgtcacgccaaatataggcgctgtcagccacggatgtgtattaaaccattccaaatgccgctgtaaggcttcgtttcttttcgctccgggaccgtacaattttttgatcgccggtatcatgacataacaatatcccattgcctgcacacgttcgaagttaaaggaaccgagtaaaaaatttgaacgaataaacatgctgaaaatttctttcttcgttaatcgtttttctttctccattttttcttccccctcatcgtttaggcatcaagatcatcatcatcgtcatcataaacagcaacactgccactgtctgatgcggccgcgactgctccgtgagcgctttgtttttgcatcacctgctggtataaaagcgccagacagagaccaagggctccaaatcccactaagttaaaatcggtaaacgccgctaataagaaaccaatatagaaaaatggctttaaataaggaatattcatcatattgatcaccatggcatacccgactaccacaataatgcctccgcctatttgcagtccttttgtaatgacatcaggaatatttcccaggaacgcctgaacagcgctgacactaattaaagcaacaatcaatgtaggaatcatgacgcgcaaagcttgaaacaccatcgcggtaatatgcataatttcaattccttttatatttcccgcttttgcatattgatcagcgcggtggatgaaaaagacagtgatcgtccgaacaaaaatcgtcagcgcctgacccgcagctgctaaagcaacagcgacagcaatcccctcgccaattccttgatcagcggtaataactaaaatggttgagatgacagaggcgatcgctgtatcaggtgccatggcaagcccgacgttcatccagccgagcgccatcagctccagtgtgcctccaagaataattcccgtttttaagtccccgagcaccaagccaaccaacgtacaggccacaagcggccggtgtgtctgcccttcatccaatacacttgcgattccggtgattgctgcaatgattaacaacaaaataatttgtaatgaagacatattctcatccccttgattattttgctacgttccgtaaaatctgtacaaaatcctcactggcatctgaaggcagctgcctcaattccagtttcacgcccttgtcacttaatgtttcaaatgcctttatatcttgttctgtgacactgactgattttgtgatttgcctgcgatgattttcaaaacgcattcccccgacgtttacggttttgatcggtacacctgcttctataagagatacaatatcggacggattttcaaacaagagcattgccgttaccccttcgtagcgcggactatgaaatgcttttgccattttagaaaccgagacggcactcgcctttacatttgaaggcgcaacagaaaggatcagcgtttttctcatttcgtcctgagcaatatcgtcggagacaacgatgattcggtcggctgcatggacttttatccaccttgtcaggatttggccgtgaataaagcggtcatcaattcttgctaacacaatgttcatcataattcatcctctcttgtatcttgattggctgtttttactttttctaaatgttcactgcacacttgaaagctttgctgactcattgcttttaagttgttcagcaaatctttgagagccagatgttctctcaggcttaatacctccagcagaatcggcaggtttacgccggctgccatatccattctttgatcctcagcaataaaggaagctgccgcgttatatggcgtccctccaaaaatatcgactaaaaaaagcacttcatgttcttccgggatatccttgagcgcctgatgatatttttcttgcagcgtttgtattccttcccctttaaaaaacggcactgcaatcaggttattttcttcaccgaatatcatccctgaagattcttttaatgctatgggaaaatctccatgaccgctgataataactgaaatcatatctattgctcctttcctgttttgtacatccatatataatgcaaggatcgtgccaacacagttgtgttaagcgttttcattgttatttcagccaatagcaatttgttgtcgaaacacttaaaacgaaaaaaataaacctgtattaaaatggtgttccatttaatacaggttcatataaaaaaactgtttttaaaacagctggccatgcacttcttcagcaaatatggcggctataaataatttttcatcatcacttatgcgaagtccgagcttttcttcataaggggctaatgttcgttctgtcacgtacaccatttccttcagctgatcattgatctcttcttcctccgagaaagcgatcggattctgcttaattaccctttcaaaggcgaaagccgtgtgcataatgactttaatcaaaaccgcattattgaaaatgacccccagctcatcttgaacggtttgcagccactccaataacatttcgatcacatggtggggattcaagaagacaaggtattttttcaggctatcctcgcaaagctccctgacaataatatttgcttcgttcaatccattgctcaaggggatgcttccttttgtaatcgcctgttgaatcagcttctctccctccccttcaattaacacttctaaagatacatgcggagcattgattttagggtctttcgttccgactgtcgcaaggatttcatactctttttcgatttcttttatgctgttggccagtttaatcgatgatacggtcaatatgtgaatcggggtatcggaggccttgtttacgatcgtggttagaatgtcttccagctttttggccgttccgctgcccgtcgtgcagatggataccaatgccttctttttgccggatgccgctggctgacgctcccacagctcgataaaatccttcgtgaccgattgatagatcgcatgcaaatttaaattcaaatagttgacctttctgacagcatccagcaccattgaagtcgtaacattgctgatcgttttgatggaaatacctgtcttttcctccagcctgctttccagcattgcaagcgaccccatgtctaccagcattaaaacaccttcaccttcatcaacctgtttcattttttctgctacgcattcaagaatgtccgaaggtgaaacagaaagtggcatatcgactgctgcaatcggcgtgctccctagcagttctgtcgcaacttcaaccatcgaactcgccgtgctgtttccatgagcagccacgatgataccgactcttttgttctcctttaacgatttgatggaatggattaacatcgttaagtagatgacttctatttcaggaatagccactttaaaatattcctgaattttatctttaaaaatcatcgccacccgatattctttcacatgagtatcacgaatttcatcagtctcctgtgtattcaaaacatcaatttgctttcctcgctttaaaaatgcgtcaatatgcatactcaagaaataaataaacttgcggtcaaatgtacaatccagctcatgttcagctatttcttttaactgttttgtcatttgaatcacgtcatcttcaacgaatgtcagcaggttgtctttttgaaaagcttgatgatgaaaaaaacttctgacatgcaaatggacatcagtcaagatgtattggttaatatcctttttggataaaccttctttcataagcgttttcactttttcctcaatcaaatgatataagttaaatgaaaggtcttcgtcaatttttgttgtttcatcttctacaatcggagagataatagttgtaatattgacatattcagaaatggctttgcttctttgcatgtttttgctgctggacatccattcttgcttgatttcatcaggcagatcgcgaacagtcagttcaataacctcatttctgtcaaggttatgcaaaaatccgtgtgcgcaaactaactggacatttgatttcagctgtccgacattcccaaatttcgcagagtgaataagcgcattatagacatcgatatgcacactcagattcttcttaatccgctctgcttctttccctaataaaaacgtcgtcagatcgactctttctttaagcgatcgttcttcaagcgaaggaatatgaatggtcattgggattcttcgcaaaaacgttttcaatagtgcagaactcggattttctgtagtcgcacaaataaacaatacgttcgatgttcgtttatgttcagattctccaagcctgttataagaaccgctgtcaataaaataaaacagcatttcttgtccctcgggagggagacggtggatttcatccataaaaagaatgcccccattggcctgttcgactaaacctgccttatcctcggcagcacctgtaaatgaaccttttttgtgtccgaataattgagaaagcaataattgagggttgttgtagtagtctgcacagttaaatgtaataaatggtgcgccggccttcaatatgtcagagtaaatggcaaactggtaaattcggttcgcaaaaagggatttaccggaaccagtcggccctaggaggagcatatgcagaccgttcggcggataaaagacagctgcttttgcctgggagatcgctttcttcaaactcccttttgcccctatcataagctctaggggattcgtggaaatgtgttgatgattttgctttgaatttccggaaaacgcctgaaggtctttcacttccatcatctctgtatcccatttcttgttgaataatttttctgctatctcgactgggatgtatcttacaggaaacgttttaattttgatgacctttttggaccggacgagattgttcaattcaaagctgacattggaccgctccattttcagctgctcggcaatctcctttgctgaattcccttgtatttttaaaagatgatctaaggttgaatcatgaaaattatgcttgagctgatggtatattttatctattcttctcacgtctatcatcctttgtccttattagataagccattaacaagaatatttcgaaaatttatagtccgcgttgagattatctgctgatacacgtttaaaaaggtctctatagcagattgacaaaactggcttttatgcgtatatgtttacatgttgaatcatttgcatctcatattagtatgatagatgctcagttctcgagggccagtccccttcaaaagtaataatcagtaaacagtttatcattctcggggaatgtaatgatgtcaaaatcatcaatgacaaaaaatgaatcttatagatcatgacaaattacccaaatataaccccttaagttcgctcacaactaaaaagacgggcactctatgtgaccgccacagtattacaatttgcaaaacttcgtcatttttgcaaagttaaggaatctgtaagcttaaaaactttatctccgatatctctcgatttgatcccccctgtaggcctcaaacatagtgggtatgcaattatacaaatcgttaccgattaaaactagcctgtcagattgtccaaatgactttcctgttttactctgctattcaggtagaatcaggagtgaaaatagagccacaagacatgtaacagcacttaaaatagttttaaaatttaaaaataaaagtatctattcttttaaatgttataatatccgataaaactttacacatctttttattactggaggaaaataaaattgataggcaattctagcaaagacaattttggccagcaacagaaattgtctagaggccttaaaaacaggcatatacaattaatggcgattggaggtgcaatcggtacaggtttatttttaggttcaggtaaatccatccattttgcaggaccatccattttatttgcttacttgatcaccggcgtattttgctttttcattatgcgttcgctcggagaactgctcttatcaaatgcgggataccactcttttgttgattttgtaagggactatttaggaaacatggcagcatttatcactgggtggacctactggttctgttggatttccctcgcgatggctgatttaacggcggtcggcatttatacgcaatattggcttcccgatgtgcctcaatggctgccgggtcttcttgcgcttattatcctgctgatcatgaaccttgccaccgttaaacttttcggagaattagaattttggtttgcattgatcaaagtcattgccatactggctctgatcgtaactggcattttcctgattgcgaaaggtttttcggcagcttccggccctgccagcctcaccaacctttggagccacggcggcatgttcccaaatggatggcatgggtttatcctatcgttccaaatggtcgtcttcgctttcgtgggtattgaacttgttggactgacagcaggtgaaacagaaaatccccaaaaagtgatccctaaagccatcaatcaaatccctgtccggattttacttttttatgttggcgcacttttcgtgattatgtgtatctatccttggaatgtgttgaatccaaacgaaagcccatttgttcaggtcttctctgcagtaggcatcgttgtggctgccagtttgatcaattttgttgtattaacatcagccgcctcagctgcaaatagcgctttattcagcacaagccgaatggtctattcacttgcaaaggatcatcacgcacctggactattaaagaaattaacttcttctaacgtgccaagcaatgcgctgttcttttcatccgtcgccattctgattggcgttagtctgaattatttaatgcccgaacaagtctttacactgattacaagtgtttctacaatatgcttcatttttatttggggcatcacggtgatttgccatttgaaatatcgaaaaacaaggcagcatgaagcgaaagcaaacaaattcaaaatgcctttttacccattatccaactatttaacacttgcatttctcgcgttcattcttgtcatattggcactggcgaatgatacacgtattgctttgtttgtcaccccggtctggtttgttttattgattattttgtataaggtgcaaacccgcagaggacataagatgaaataaaaaaaagacaagggatactcactcccttgtctttttatatgtgtcaaacactaaattaaactttggtttcaaatctcattcacttcatttaagtgttaactcaaaccagttttgatgccgaaacctactaatattattccggtaattttttgaaacactttctggaacttcgagtttttcatccatttttttgcgtaatcaataatataaacaagaaacagaaaccacaacaccgctaataaggttagaattgaagctaaaatgataagctgctggtttatatttccgttcaaattgataaattggggcatgattgtaacatacactaaaacagttttaggatttagaatgttactgagtgatccttgcataaaggaagttttataataacgtttcggagaacttgccatattttttgcttgggattgcatgtcatctaacgaaaacatacttttagcaaaaaagctttttacacctaaataaattaagtatgccgctcccaaatatttgatcgttgtgaaaagaatcactgactttgcgattaccactgataatcctaaaatggcaatcaccgtccaaaaggaaagtcctgtcgccaatccgagaatgttataacggccggctttcggaccatacctaagcgtatttttcatcacaagcatcgtatctgcccccggcatgataaccatcatggcagcgatcggtatgtatgcgagtaagctgtgcattgttctctccccctttaaaaatcccctcaatcatatagtgactacaaaagtaactacttataaaagtgtatcaatgcatttggaataaatcaatatggtttgttaaaatagcgattactaaggcagcgattgctctttatattggaggatatatgaaagaaaatatgttagacattttaaaaaacctcaattttacagaatatgaatcgaaagcgtatttggcattattgcaagaatcacctttaacaggctatgccgttgccaaaaaatccggagtgccccgttctaaaatttatgaagtcttggaaagccttgtcataaggggagatgtttttgtcagtcatggaaatacacctcagtatgttccagtccccgcaaaagaactgattaaaaaccgccggctcaaagcggaagagcattttgatcaggctgagaaatattttgaaaagttcgagcagactgctaatgaccgggaaaacatctggaatatcaccggccgcagtgaaattcttgaaaaggtgaaggcttgtattttatctgccaaaaaaagaatcctcttagaaatatggaaagaggattttgaggagatagaatcagagctaaaacaggcggcagaacaaggcgttattgtcaccattattgcgtacggagacatcgtatctgatttttccaatgtttaccttcatgatatgagcagtgaaattacagaagagtatgacggacggtggcttgtctatagcggagatgattcagaagtagtagcgggcattgtctcacttggcaatgacagccgtgctgcatggacgatgcatgtaggtttagtcatgcctattactgaagtgatcattcatgatctgtacctcatggaaattctgaaaaagcatagagagctattagaagagagcttcgggaaaaatctcatccagttgcgccgtaaattttctattcactcagatttcaaaaaacattatttggaataatgtttggcatctcttaccccaaaaacaaggcttgtacaaaacaagccttgtttttttatgcataaaccccccatccccatgctgatttacttctctcttttaaaaaatgtgattctgcgcaaactatttttcagcctgccgcgtctatcctaggtaacagcctacgatatacgtatattcaaaaaggagccctttattgcaatgaagaaaaaacaaacaacaaaagcgttgcttgtcacatgcataactgatcataagcaagatttctaccggttggctttcagttatgtgaaaaatcaagatgacgcattagatattgttcaagaatcgataaaaaaagcgctgagctcagttgaaacggtcaaaaaccctgagacgataaaaagctggttttataaaattttagtacggacagccattgactttttgcgcaaacaaaaaaagataagagtgatggacgacgaaacgatagaatttttaagcaaaggaaaggaagaccattacaaggatactgatctccatgaagcgcttgacgaattgccgtaccgctataaaaccattattattttacgtttttttgaagacctcaaattagaagaaattgcggaaattacaggagaaaacacgaataccgtcaaaacgcgcctatacagagcattgaagctgatgcgcattcagttgacgaaggaggatctttcttaatggataagagattacagcaattaagagaagaatataaaaatgttcagattcctaaagaattggatatcattgttgaaaaagcccttcagcaagaaccaaaaaagaaaagaatcgtcatgtggccgacatcagcagcaatcgctgcagctattttattcactgcacttgttaatatcaacccggacgccgctcaggctatgtccaagatccctgtcatcggcaaaatcgtcaaagcgatcacctttattgaaatcaaagaggaaaaagaccaatcaagcattgatgtcaaaacacctgctttgtccgggctttctaataaagagcttgaaaacagcattaaccagaaatacttgaaagaaagccagcagctgtataaagagtttatacagtccacatccaaaaacaaaaaagggcatctcagcatctacagtgattacgagacggtcacagacacgccagatttactctctatccggcgcaatattgaaacaacacaagcatcttcctacacacaaagccgttatattacaattgacaaaaagaatgatattttacttacattaaaaagcttattcaaagatgagcgctatatcaaagtcatcagtcaaaacatcaaagaacaaatgaaacagcaaatgaaggaagatccaaataaaatatattggctcactgacgaagatgcagaaccgttcaaaacgattcttcctgatcagacgttttacattactgaagaccataaacttgtgatctcatttgacgaatatgaagtcgcccccggctatatgggcgttacagagtttacaattccaacccgtgtcatttcaaacttgctcgtgggagaacgttatattcgataaaataaaaacatccatctaagattatggatgttttctctcttctctattcgaggtcgtaacctcgctaccaaaaacaacgagaatatttgcatactattggaggaatacccatgtatcacaagacacagcatcatcgatacattcctggacttgatggccttcgggctttcgccgtcctgtcagttatcacttatcacctaaatttcaattgggctaacggtggttttatcggagttgatatcttttttgttttatcggatatttgattacatctattctattaccggcatatggaaatgatatcaatcttgattttcgggatttttgggtgcgccgcattcggcggcttatgccagcggcttaccttatgatcttttccactgttgtgtgggtcgtattgtttgatcgagaactattacacactgtacgtggagatgcgatctcttctctcttttatatgagcaattggtggtttatttttcacaagctatcatattttgatagtttcggttccccatcacctctaaaaaacctttggtctctggcgattgaagaacaattttatatcatatggccgatgttcttagttgttggaatgtacataatgaaaagccacgccagattggctgcggtgatatcattgcttgcgctttgttcagccgtgatgatgagcgtactgtatgaacctggcggagatccgagccgcgtttactatggcacagacactcgttcgtttgaacttctcatcggatgtgccttggctttggtatggccgatgaaaaggctgtcttccaacaggctgccaagcaaactgaagcacactttgcacgccactgaattttcggcattttgtattttagtgttatgtgtctatttctcagatgaatacgagccttttctttacagaggcggaatgctattcattagcgtgactgccgcaatccttattgcatgtgtttgccatccgagcagctttttaggcaatctgctttcatggaggccgcttcggtggcttggaacgaggtcttacggaatttatctttggcactaccctgttattgtgttaagcacgccagttcaagaaatcggaaaccctgttttttggcatatcgtgctaaaggtcattgtgacatgtatacttgccgagctttcctatcattttattgagaagccgatacggacacagggatttaggtcatttttccgccgtgtttttatacatagaatcatagaatggaaaacgacatctgtcatcagcaaactgtcaattggtttcgtcattttcgctatacttatttttgcaggagggctgtctgggttagccggagagcaaaagcaccctaccaaatggacctatagctcacaagaaacaaatgctgactccagccaggcttctggggataaaaagaacgctgcagcagataaaaaacactatcctgaacaaaagacaacagaatccgatcaacgtcaaaaggaaaacaaagatagtgggcaagagactcataaaaagaaagacacgcaatctcaacagacgaaaaaaccagcagacactgcgaaagaggtgttagctataggagattccgtcatgcttgatatttcttcacacctgcgtcagtcattttcaaatgtgacgattgatggaaaggtaggaagacaaatgtctcaagctttggaactcgcaagggagtacaagtcttttaatcagccgaacaaggctgtcatcattgagcttggaaccaatggctactttacaaacagccaaatcgaacaactgcttcaatctttctcaaaagcccatatctatcttgtcaatacacgggttccccgccaatgggaaagcaaggttaatgaatctttacagcaccaggcaagcgcacatcaaaatgttacgttagttgactggcatacagaagcccttcagcatccggaatattttacccctgatggtgttcacttggttcctaaaggggcaaaagctttgactgctcttattgttcaggcgatgaaatcgtaaaaaagagatcctatacggatcacttttttactttagtttctgatcgttgattatgtcttctttcagcaaggcagcccttatgtttacatgccgtttacgtaagggtaagccaaaattgaatggagggatgataatgaaaggaaatgaagaacatgacatccaaaaagagttgaaacgatatgagctttttttcaaaaaacgatataaggttctttatacattaaacgattttatcatcggtgctatgtttctcgttggaagttttttctttttctatgaccggttaatgtcggcagggatatggctgtttgcgatcggaagtttgctactgttaatcaggccgaccattcggctgattcatgactttcattaccgtaagcatgtggaacagcaattcaagcatcaatcttcaacagatgactgatcttaaggaataagaaagaacaaaatgccaaaagcctgagttgaaaatcaaaaacaagactttcagactatttatttttgaaaataaggtaaaaagaactaaacttttgcctctgcatgccgatatgaataataaggccggcgcgatactccctataacatccttttcagtagatttcattatcgtgccggttttctcatatgcaaagcaatcccgccaatcagattggcgggattttatattttacattcctgtccaaacgtcttttacataacgtttttgatcttgcagcttttgcagccattcagctgattcttcctgacttgctcctttttcagcttcatacgccaatcgcaaagttttctctacatcaggagccatttgcgatccatcaccgcatacgtaaatatgagcccctttttcaatgagtgtcatcaatttctgcgtatcttgcttgagcaagtgctggacatatccttttggttcgttttcgacgcgcgagtagcatcggcggattgtgaccaaaccgtcctgttccgcttgatccagctcttctctgtaaaggtcgtcatggtccgggcgacggcagccgaagtataaaagtgcttcaccaagggtgcttccttccttcttcaaaaccgatcttgcctgaataaagcccctgaatggcgcaattcctgtgcccggcccgaccataatcataggcgtttcaggctcatccggcatctggaatccggactgcggggtacgaatgaaacaggctgctgcatcatctgtattcaattctgctaaataattagaggcgacaccccggtattcacctcggccgctccatgctgaggctttcacaactcctaccgtcatgctcacgatatttgcatgaactttcggtgagcttgaaatggaatagtatctcggttttagtgatggcaaaagtgctaaaaaccgttcaaacggcatttcgcaagcaggataatcctctaaaaaatcaagcatggtaagacgtcttgcaagtacctgctctttgtaaatgccatcatctaaaacgagctgttccagctctttttgatgcggcggacagactgtataagaggccagctcccgaagctgaagccttgatgccggttcctgcagctctacataggacgacaataaatccgcaactttgatcggccgatccatcggcagatgagacatatgagcgcttccgcttacttttatcacatgattggactgcaaaccgaatcggctgagaacccgctgaacaagctccctgctgttcttcggcaggattccgatatgatcgccttctttatatgttttaccagccggaatttccaattcaatatggcgggttgaacgcgtgctgtcagctgtctggagttctcgattctctaacacaatcccttcaaaggcgccatatgctttagcaaccggcgtttccgtcgcttcactgagaaaagtaatcgataatgaaggcctgtcttctttctgggctatttcgttaatgtcaaatgcgtccattgtttccttccagaagcggttttcccaagactcgcggtggctttcaaaatcatcggcggcgtcaccttccccaatctctgttaaacgcgatgccccctttgctttcatcatgtcatcaatcaggcggggaatccgctgatacgtgctggcccagctccggtttccgcagccgaataccgcataggaaacacctttcaattggccttcctcaagctctttcagccactctacaaagccggcagcattatcaggcggcgccccattataagaagccgttacaatgacgactgcccctccttcagggagcttgccgatataatcatcaagcggagccgtttcagctgtaaagcccatctggcggccttgagcagccagttcaccggctattccctcagctgtcccaagatttgaaccaaaaagaacaagtaaaggtgtgccgtgtttaggtttggtttcttttggctttgtttctgctttgatgtctgcctgttcttttctctgtacattgattgccgctgttttccgcggtttcacagtaattttaaaatcatccggcttgatcgttaatgcttctttgatttttagttcgtagccagtatggtttatcaattcaaaatgctttaatacaagaccgagaaccattgtcgcttcttgaagagcaaactgcatgccaatacaagcgcgctgtccgtttccaaacggcttatacgcatggtgagggatacttgaaggatcctcaaaccgttccggacggaaatcttccgcatccggtccccaagcgttttgatcccggtgcagttttggaattaaaacagtgactggctgccctttgctgatcggatattccccgcctagaacagtatcctccttcgcatatagagaaaaagccggagctgttggatacagtctgagggtttcatttaaaaccatccgaatgtatttgagctgctggatttgtttatattcaggcgtgtcatccgttaacacgcgatccgcttcctcctgagcttttttcagtttttccggatgtgtaagcagacaataaatcgcaaaggaaagcaaaccgcttgtcgtctcatgtccagcaattaaaaatgtgatgatttgataccttatgttttcatcatccagcgtttcacccgttactggatctttggcataaagcatgagagacaagagatccttgatgttatcatccggattcgcctttcgctccgctatcattctatcgaccagggagttcatgacttctatatccttttgaaactgcagcttcgttttcaccatcatcttatcttgcaggcccagtctttttgattgattcatcgcctcttttaaggcacggagcatactggtgataaacggatgctgtgaatcacggtaaaagctgttgaatcgatagttaaatccgcataacccaatcgtatcaagcgtcagacgtgtcatatcgtctgctacatcaatttcttcattagggtttaaccggctccatttttgaatcagctgggttgcgatatccagcatcatagaatgatagcctttcatcgctttttgactaaaactcggcagcaaaatgcggtgggctttttgccagttcggttcgtgcgtccagcttgtaaataagccatctcccccgaattcgcgcaccttttgcaagcctttgccaaggttcttgtcaaagcggctttcatcacacacttcagccacaagattgtgacccgatacaaaaacactggatactcccggaaaatcaaaacggaaaatcggccccaattcatcagctatccgccataaggattgagaaagctgttctttttcaagatgcggaagattttttaaaggtccgtatgttttgggctgaggtattgcgcttgcctgtttcattaacatctccctttcctatttttgtgatgaatgaagcttaatggcgtcccagcagcattgttccaattcagtaattaaatcagtgtccatctctatatcacctgtttgaacgagctgatatatcttgagaaacgcccctaatacaatcgcaattaacacattagagggcaggctgcgaatcacgccttccgcttttcccttattaaaatagtcatcaagcatttgagtcagattttctatcatttttttgcttgtatgatttaagtaatgagcgtcttttttggtttcaagaaaaaaaagcgcatagtcgctctctttcgtaaactgaacgagacagcaaaatacgtggtgaaagccttctctgacaggcaattctgaaacgtcttgcttcagtttttccgtaaatcgctggatgctttcttgaaacagtacgttaacgagtgtttctttgctgtcaaaataacgatagatcgttcctgtccctacatgagcacgttcagctatcataggaatagtggtagcgtcaaaacccctttccgtaaaaagtgagactgacgctttcataatcatgtcgtatttactgctggatgcggatatcatgtaatctgacaacctccgattcgtttacggaatgaatattcattccttttgttcacaaagaatgtctgccctgtctgatatcacctctttgttctttcttctgttataagtttatatgaaaaaaactttttttaatataaagtatatgcaaaaaataaaaaattaagaaaatatacccaaatcctaatacaaggatcttggatatatttcccgagaaattttttatttaacagccacaatacatagacaggaagcacgcctgataacagaaagatccctgaaatgctggtctttcagcagttgaatatacgttttctctttttcaccggtatttgtgtcaatactgatataaaaccggccgtcaatttgaagcaccctgtaaatttctcttaatgcaagcctaatatcggtgcagctttgaaccgtatgtaaagaaaagactttattaaaggtacggtcatcaaagggaatgtcctctggatagccatgaaaaacctccccgttccccatgttctttcgattcgcacgtgatatctgtcttacctttcgctttgaaggatcaatgctttttaggcttcccttttctagtttcttggttatgcttttaaagacagtgccatttccaattccaatttctaaaattctgtcatttccttgtatatctatagagtcaatcatcatatgctcaattgttttggttagcttatatttccgagaaaataatttccaaaaattcgatcgtttatagagtctattttctagcattttaaacacctgcttttggtttcctatgtttatttattatattcaaaaaataaacatcatcttcattctaaaagtgaaggaaggtaccaactagacggcaatgtattgaaaaatgtttcaatagaactaaactttttcatttttttccgcaaaaaaagcagaaaacaaaatgttttctgccctctttctaatgccaatgataagggaatacatacagcctttgctgctgcattgccatcagcctctgctgtcggaatggatttccataaccatgtttgaaggaatgcggcatggacgcataaccatggccaatcgacggcagccttttttgataatcgttcatcatgccatcacctgcctcacagtaacgttgatttattgtatgcaggcaggcattttcttgacagtcatatcgctaaacttggtccttctccattgtataatgcatcaataattccattctaagcatatgccattcccccttcagtttttttcgttgcttttagcgccagtttgttaaataaagatgctttaactgagactctttcatttcatcataaatctgctcaatctgctgttctcgttcgaattcttccaggcttttaaaccgtttttttatcgttaacgttaaaaagaataggttaatcgtcatatcgctcaccccctttcaaagtccgcatcaagcgaaataacccgcggcacaccccttctgccgcgggcaaataaaaaccgcagacaaaagaagacaccaatgcctctactgcctgcggggagttgcgtatgtccgactattccgaatttaatgcgtgcgataagcatcggttaaggaaggacacgaactcttccacaggctgaataaaccatgaacttttacatgtgtatcacgtacaggttgacgtcgttgtctcattgtcattttggttcagcctcctttgctttttttcttactttgtaagtatatccaccaaattccattttgtaaacatctttttctaaaaatggacggaaattgtgcaaatcatcgaatggatttgcccgttggtcatgacacctgcttcatttcttttctggagcggtctttcttatgatatgcaataaaataaatgagaccgacaaatacagctccgccgatgacattaccgataaaagccggaatgatgtttccgatgaactgcccccacgtgaatgagcctgcaaaaatggcagcaggaatcacaaacatgttggcgacaacgtgctgaaatccgatagccacaaaagccatgattgggaaccagatgccaaggatttttcctgctgcgtcttgggcgccgaaagaaagccacactgcaagacatacaagccagttacagccgatggcggaaatgagaaccttgccaaagctcatatcaagctttccttgggcaacggcaatcgttttttctaaataaggacctgtttcagtcaatccaaccaaatgcccgaaaaagtacgcaacaaacaatgcgccgattaagttcataattgtgacgattccccagttaatcgctaactcttttactgatatttttctcgaaaataacgccattgcaactgacatcatattgcctgtgatcagttcagcgccagcgagtacgacaaggatcaggccgactggaaatactgctgcaccaatcaaactggacaggctcccccattctttcggaagatcgccgattaccctgatatcaagcaaatacccaagcgcgataaatgcaccgcctaaaaaccccagcacgagcagtgacggcagcgggagctttatttttttcatccctgcttcaattgctgcttccgctatttcatccggttttcgaaaagccataataaaacgcctccattacttcttcttttctcacagttatgcaagaaaggcaataaaaaaggcagcactcaaataacctgtgtcaaaccaggcgtttgaatgctgcctaacttgtatgcatacccatacaacaatatcaagcagtatgaagatattgaaagagaatatatacagttcgtgcatacattccattgctttagccttctataactgtagcaacatcatatcaaatgtgacaaatttgtgtcaatgacaaatatactagctttgcagaacttctttttgctcatctatttttcggtcaaaaacaaatacagatacagcgatgttttcctcaattttaatatcagaaaacaaatggactagcttagctcccatgagttcctccattccttccggtgtttgtttggaataaaggtcttgaattaggcttgtccgggccgcatgtaccatctctcttccttcaggcgtgcgggcgataaactgctcgcttgcactcagatttccatatagtgttgaaactgccatgttttctacaaatacagtatgaattctctcaggcccttttccgaacaattctttgcgaagttttcgaataatatcattgaattcatgaatttttttagacatgctgattaccccttccgatattgccttataaaggcttttcccggttcccctcaggacatttcacttggttaaaattttcctgccatattgtattataataaatatcacattataataaaagcagtgttgatggatttgtaataggatcttgttatgagtctatcgttttataaaaatcaaggattggtctgttagtaagacttgctagtgaactattccgccatgtgtgtttacaccttcttagaattaagggcaggtgtatctctatacatggctttttttgacttcttgaaagaaagatggaggggaatatgaatatgatggacgttaagtcgatcagtgtccgtgtagacggaacagaaattcaagcacgagcaggggccacaattttagatattttaaatgaaaacggaattgagtacccgcagatttgccacgtaccagaggttgacccgattcaaacttgtgatacttgcatagtagaggcaaacggcaagctggttcgttcatgcgcgaccgttgcagaaaacgggatgtctattgatctttcaggaaatcgagtgaaagaagcgcaaaccgaagcgatggaccgccttcttgaaaatcatttgctgtattgtacagtttgcgataacaacaatggaaactgtacgctgcataatacagcggaaatgatggggatcgagcatcaaaaatacccatacacgccaaaagaagatccttcttgcgcggttgatatgtctcatcctttttaccgctatgatccaaaccaatgtattgcctgcggccagtgtgttgaggtctgtcaaaaccttcaggtaaatgaaacactctcaatcgactgggagcgcgaacgccctcgcgtcatttgggatgagggagttccgatcaatgaatcttcctgtgtcagctgcggtcagtgtgtcacagtatgtccatgtaatgcactgatggaaaaatcaatgctcgggcaggctggttttatgacaggcattaaagaggacgtcatggaaccgatgattgatctcgtgaaaaatgttgaaccggggtatggcagcatttttgccatttctgaagtcgaagcggcaatgcgtgaaacgagaacgaaaaaaacgaaaactgtatgtacgttctgcggtgtcggatgttcatttgaagtatggacaaaaggacgggatattttaaagatccagcctgtttctgatgctccggttaacgcgatttccacatgtgtcaaagggaaattcggctgggattttgtcaattctgaggagcggatcacaaagcctttaatccgtaaaaacggagcctttgtggagtcttcttgggcagaagccctcgatcttgtcgcaagcagattaggatcaattaaagagcagtacggtaaaggctctgtcgggtttatttcttcttctaaaattacgaatgaagaaaactacgtcattcaaaaactagcgcgtcaggtatttgaaacaaacaacgtcgataactgctcacgctactgccagtctcctgctacagacggattgttccgcactgtcggcatgggcggtgacgccggcacgattaaagatattgccaaagcaggcctcgtcatcattgtcggtgccaatccggcggaaggacacccagtgctcgcaacacgcgtcaaacgggcacacaagctccacggtcaaaaactgattgttgctgacctgcgtaaaaatgagatggctgagcgatctgatctgttcatcagccctaaacaaggcacagaccaagtttggctgatggctgttacgaaatatatgatcgaccaaggctggcacgatcaggcgtttattgatgagaacgtcaattactttgaagattataaagaaacccttaaaacgtatacgcttgattatgcagaacgcatcacaggcctttcaaaagaaaacatcattcaaattgctgaaatgattcgtgatgctgacggcacttgtgtcctttggggaatgggtgtcacacaaaatacaggcggttctgatacatcagcagccatttcaaacctgcttctcgctacgggcaactatcgccgtccaggtgccggcgcttatcctctgcgcggacacaataacgtgcaaggcgcatgtgatatgggaacattgcctggctggctgccgggatatcagcatattacagatgacaaggcccgcgctaaatttgaagaggcatatggtgtcgagattgatggaaagcctggtttagataatattcaaatgcttcatgccattgaagaaggaaaaatgaaagctatgtatcttgtcggtgaggatatggcactggtcgattcaaacgcgaaccatgtgcatgatattttatcaagccttgatttcttcgtggtacaggacatctttctgtcaagaacagctcaatatgctgatgtcgtcttgccggccactccttcacttgaaaaagacggaacatttaccaacacagaacgccgtgtgcagcgattgtatcaggcgcttccgacgcttggtgacgcaaaaccggactggtggattattcaagaggtggcaaaccgtttaggagcgaattggaattacagccatccaagtgacattttctctgaaatggcgagtctttctcctctgtttgccaaagcaagctatgaggtgcttgaaggctggaacagcttcctatggggcagcttcacaggtgaaagcacaccgcttctgtatgaagacggatttaatttccctgacaaaaaagcccgctttgccctttctgattggaccgagccagcggcatttccggaggaatatgaccttcatatcaataacggccggatgctggagcatttccacgaaggaaacatgacaaataaatcgaaaggcatccaagcgaaagtgccgaatgtattcgttgagatctcacctgagcttgcacaagagcgaggtgtttgtgacggttcgcttgtacggctcgtttctccgttcggagcagtcaaattgaacgcgctgatcacagaccgggtacggaaaaatgaactctatctgccaatgaactcgacagacaaggagtcagcgattaacttcttgacgggccctgcagctgataaacggacgaacacgcctgcttataaacagacaaaggtccgcatggaagtgcttggcggctgtgaaacagcgccgcttccaaaaacaaatccgcgcaacaaaaaacggcatccgcaaaacggagtcgaagcagaaagaaaatggaaccgccctggctatgtacatctgactgattaaacgataggaggaaaacgaatggccactccgattacgacgatcaaaaaagaaacaaaaacagctgagcaaatgaagcttgaaaaaatagaagaactgaaagagctgctggcggaaaatgaggacgccgtctctaaaacgatgacgttaatgaatgaactcaatgatcttggaatttttgatgcggcaacaagcatgctcagagcgaaggaagacattgccaagattgcgcttggccaagtttcccgcgagcctgtcaccaacctcatcaacacgatgatggccgccggaggcgcattgacaaaagccgatcctgagtttacagcaaagcttttagaaagcgtaatggctgggactgaacaggcacaaagctttttaaaagaagacaagaaagtcgggattctcgacctgttaaaagcaatgaacgatcctgatatcaacagagccgtcggcttcggccttcagtttttaaaaggcatgggaaaagaacttcgagaacaataacagaaaaacagccatcgctgatgatggctgtttttttattcgtcggcttcttccaaacgcttcttgtaaataagtgaacggtcagcgcaaaagaaggcaccggctaaaaatacgcaatccgctaaaaacatcgtcgatttctggcctaatgttaaaccttgatcagggagaactgcgcctatatataaaaaagtgctgactgcaagcaatgtaaaagcaaaatgcttgtagtcttcttttaaagatttcattctatttttgttcaaaagaatcacctgccagattcatagtatacgactattataatataatccggcggcttacagagaaagtaattctatccatttgttatatattttcaagcgcttggccgatatcttccaacaagtcttccgcatcttcaattcctacagaaattctgatcaagccgtccgtaatgccgagctcaagccggcgttctctcggaatagaggcatgtgtcattcttgcaggaacagaaattaagctttcaaccgcccccaggctttcagcaatggtaaacagtttcagatttcctaaaaacgcatcaacccgttcttcactgccaatatcaaaggagatcatgccgccgaagcccgctccttgcgtttttgcaagctcatgtccgggatgatttgaagaaccagggtaatataacgtttggacagcagggtgattctcaagaaagcttgcgattttccgcgcattttgatcgatcgcttccattctgagtcccaacgttttgattcctctcattaacagccaggaatcttgagggccgagcacgccgcctgtggagttttgcacaaaatgcagctcttctccaagctctttcgaagctgtcacaactaaacctccgacgacatcactgtgtccgccaagatattttgtcgcactgtgcagtacgatatcagcgcctaaagtaagcggctgttgaaaataaggagtattaaaggtattgtctacgataagcagaacacccgctttttttgcgatatcagccatgagcgtcaggtcggtgattttgagcaacgggtttgtcggtgtttcaatataaattgcttttgtattagggcgaatcgctttttcaacttcttccctgctgctcgtatcaacaaatgttgattcaatgccaagacggttaagcacctttgtcatcacgcgatatgttccgccgtacacatcatcagtcaacacgacatgatctccgctgttaaacagcatcataaccgctgtaatggcagccattcctgagctgaacgcatagcctgcttccccgctttccagttctgtcacaagtgcttcgagagcggttcgagtcggattggccgttcttgaatactcgtagcctgtatgctgccctgctttcggctgcttgtacgtgcttacttgataaatcggcacggaaactgcgcctgttttctcatcacctgtgattccgccatgtatcatcaatgtttttttcttcatatcagatgcctccttcgtatatttgtttgctgatatatcgatcgctgctgtcaggaaatactgtgacaatgttagttccagcggatgcttttttcgcttcctccaatgccgcataaagcgctgcacctgaagagcttccgatcagcaggccttctttttctgccgcttctttcacaagtctaaacgcattctcatctgttacggtgtagatctcgtcaaaatggctcttatccatataatcggggataaactccatgccgatgccctctgttttatgagcgtggggctctcctccgtttaaaatcgagcccaccggttcaacaatcaccgttttgactgctggatttttttcttttaagaaggaagctgtccctgcgaatgtgcctcctgatcctgcccctgcgacaaatgtatgaatattcccatcaagcgcttcccacatttcaggcccaagcgtcttatagtaagtcgatggatttactcggtttttaaattgcaaaacgcaataagaattttcaatttcagtctccagctgaatggctttttgaatggcgccctgcattccgtcttgacgcggtgtatgaatgattgatgcgccaagcgcttgcataatttgctgtttctctctgctgaaatgttcagggacacagaaaatcgctttcagcccatattttctggcactcagcgcaaggccgatccctgtattgcctgccgtagcttctataatcactccgccgggtttcactttgcctgaatcgagcgcgtcacgaatcagcatatctcccagtctgtctttgatgcttccccctggattcatcatttcaagcttggcatacaccgccactccttctggaacatcaaagttcttcaagcggagaagcggtgtattcccaatcagctcggtaatgtccgtaatcactgtcatatatgtcctcctccttattagagggtgtttttagaaaaaacggaggagaacattctccccgttttaatgaattcgtttgatcacctttaacacaagctctgttgaatggacagccgcctgctctaaaaattggtcaaatgaaacatgtgattcttttcctgcaatatcagataacgctctgatgacgacaaacggcgttttaaattgatggcacacttgagccactgccgcagcctccatttcaaccgcatacaaatcagaaaatctcgtacgcacctcttcaacccgcttcggatcgttcatgaaagaatcgcctgttgcaatcgttccttttgcaacctgaatgccgtcgagttcagataccgcttcttcagtgatgctgatcagcttttcatccgccgcataagcagccggaagacccggcacttggccgtattcatagtcaaaagccgttacgtctacatcatggtggcgaacgtcagtggaaatgacgacatctcctacattcaatgtatgatgaaatccgccggctgagcctgtgttaataacataatcaggcttgtaacggtcaagcagaagcgtcgtgctgatagcagcatttacttttccaattcctgattttaaaagaaccacttcagttccttcatattcgcctgttgtaaattcacagtgtgcgatcgtttctgtttttgcattttcaagtttgtttcttaagatggtaacttcctcttccattgctccgatgactgctagtctcatctattcacattcccttcactttaccgtttgatcgcctccattatccacacgaagtcgttttgctgagtgaatcggactgcaaaaccttcagctgtaaacatttctttcaacgcatccaatgtaggataatgctctgtctctaaatcatttgcaagctgataaaagccttgagaacgggctttatcgatagcctgttgatacgcttgcgcatcttcaaagacggtatcggcaaacactattttatcatgcaagtgaaggtatttgccatattgctttatggcagcccgcttttcttcgtcagtcaaatgatgaaaagcatatgaactgacaattgtatcagcctgaaatggcggctcagggaatgtcaggaagtctccatcaacgatttccgacctgcctgaaagcttgtcagaagccagtttacgcattgctggagaaggttcgattccaaatacagttttgcctgcatcgagcagcttagccgtcaaattccctgtccccgggccaaattctaacacatgcgttccagatttgctgacgatggcatcaaggatatgatcatagcctctgaacgcttctttatactgaatatctaaaccttgtactgtttgatcataagttgctgcccaatcttcaaagagagggataaattcacgtcccatatttgtcacactccatatttaataattcctataagcatactatgaattaatgatggaacagttcctataataccacatcttctgaaaagcaggtactaaaacactttgtgtattttatgccatctcatattgcgcattgaccgcaaaaaagcttatacttcaaatgacttgtgaaagctggagggtcaagatatgaattttcaattagatctgattaaagacaaagtggaattttttgaagcggcttcattgcaggagcttgaaaagaaaatcaatacacaaattgaaaacaataaagccatcatgctccgggtgaaatctgtttcacaccaaactgctgtggcagaaggaagaatattgtacagcgcggtggttcatttcgcagctgaagcctaaaacaaaagcagccggttctaacccggctgcttttgtttattttagcttttctacttttgtcggcttccagccttttttatcaacccatgtaatcgtgacttgatatttattcccagtcgccttgtccaaaatcttgcctttagcatcctgagggctgccgttatttccaagccagagcaccgtcatgttatctgttgagacaccagttgcgtatgaaatggctttcagcatctcagcccagtcttgtgagcttgaatcataagtagcggcatgctcgccagcctgctcagttccgactgctttccagtcaggattttcatacgttttttccacatcgctcgatgagccgccttctgttacttttgcatctttaagcccgtcaccggctgaatctgagcttgaatctgaatcagagtcatcttttttagaagaagaatcatcttttttggaatcagagtcagaagacttctcagaatccttttcgctgtcagatgtatctttcttgctgtcttttatatcctcatccgatttcttttcagtctttcctgaagccggagattcctgtttttgcgccgtttcagaatccttgctgacatctttgctagaaggactgttaatgaagagattcgctgctactacgacaattagtatggatacgattgcgattaaaatgttaagcactaaattggcttttctgcgtttatcacgattttcataacgagattgattattgctcaataattctgcactcctttatccctcttggctcagcatatattttaacatgtgctgagaagttgttctatttctgattgatttcaatttcgtgtacttttttaacaatatcataaaacaccgaatttgtcagagccttatctcccggtgtatccatgtgtaaaacaaccagagcgtatttcggcttatccgcgggaaaatatccggcaaaccatttttcatagagcgtttccctctcttttgaaagcttgcctgtttgggctgtgcccgacttccctgctacagtatacggaagatcttgaaaccttctgcccgttccggaaggagattctaccacccgccgcagtattttttgaagctgctgtgacgtatatttgtctatcgtttcccctttgagcttctgatctttaaacgtaacgagcgttgtgccgttcttatactcaatttgttcggcaattttcacctgccgtttttctccgccgcgggcgattgtcgccatcatattggctacctccagcggcgttacctttacgtttttctgcccgattgctgtttgcgcaatggcttttttgactgatttgtctttttcatccccccaaatcacgccgcttttttcgttatacagctggcggaaatcggtttcgtggtacagttttccctcccagcctgcccgatcagtgagagccagcttctcggacatatcttcaataaccgagctgtcttttttcattaattgttctgcaagactcgtaaatgtgtaattacagctttgggcaaaactttcatcaaaagacaaggttcctttgtcgtcccccggttccccgtacaggtttaaattgcaattaaaggtttgactaggcttcaccatattattttcgattgcagctgcggcaatgactgttttaaaaactgatccgggatagattggcgtcagcatataattttgaagtgtgttttgccgggacacatctgcatctggtttgcttacaatccccagaacactgctattttcgatgtccagcagcacagctcctccctttttcagcccctgttcatccaatacctcctccatcgctttttgaatgctttgatcgatcgttgttttgacctggagcggataaaatgtattggcttcagctgtatatttgacgtccatgccaaacaaagggtttccttttccgtccacatgatataaaagctttgtgtcttgttccggaagcaaaaactcgtcaaatgtccgttctaaaccggttgttccgatttctgttgtaatcggaaggctctccttgtcaggatatttcttgcgaagcagcgccggatcttggttcgtgctccctatcgtatgtgaagcaaggctgggcttgtcttcattctccatatatacgccgtaaatgccgggatatttcaaagaattgatttttgtgatagattgttttgaaagtgttttgattttcttttgctgcaaaatgaccggtttttttgcctgacctagtgtctggcgcaaatcatcttcagacatgccgaggatgtccgcaacttttttgatcggccaatcctgcgtcagcagaaaagggaacaaaacaaccgcaggctcgctttgtcctgtcagcgcccgcccgtttcgatctaaaaaagagcctcttccatctgaaatgagcacttcctccgtccgctgtttcacactttcttgaatcaaattaattttctttttagaaaatgattctgtgaaaaacagctggatttctgcaagtctcagcagaagcagaaaaaatacaatcaaaaaagcgatgactgccagcttcattcgtttcgatatcttcataaaaaaaacacctcacccacattgtggacgaggtgtttcgctgctaaacagatattatgaaattttcacaattttcacgagcatttctccgcccggtgtttgtactgtgacttcttcatctacttttttgcccaagaggctttttgcgatcggtgaatcgtttgagattttcccttcaaacgggtcagcttccgcgcttccgacgatcgtatatgattcttcatcaccgtcaggcagttcgacgaaagtgacggttttacccaaaccgacaacgttagagccgccgtcatcttcaatgattttcgcattgcgaatcatattttcaagagtcgtcacgcggccctctacaaatgcctgctcttctttcgctgaatcgtattcagagttctcggaaaggtctccgaagcttctcgcaattttgattcgctctactacttcttttcgtttaaccgttttcaaatattctaattcttgttcaagtttttgttttccttctgcagtcataggaaaaactttctcttgtgccatgtcccttcactccttctggttgtccctcaacatcttcgattatgtatgagagcataaactaaaaaatacaagaatgagaacacagggcagtcctcgttcttctctcccatataggtactgtttatcttaaactgaatcgtgtcgttctgcaaatatttcgcgtttataaacagggaaagaagggaattcgcacattcccttcctgcctatacataatatggtcagagttatttatgtctatgctatggtattacaaaatcgcgttttgttcaagaatggtttgaatttttgtgaccatcagatcaattgcgacgtgattctgaccgccttccgggataataatatcagcgtatcgtttcgtcggctcgacgaattggttatgcatcggacggaccactgacacatattgttcaatgacagaatcaatagagcgtccgcgctcattaatatctctcataatccgtctgatgatacgcaagtcagcgtccgtatcaacataaagcttgatatccatcagatcacgaagccttttgtcttcaagaacaagaatgccttcaaggataataacatcctttggctctacgtgaaccgtttcttctgaacgtgtgtgaagcttatagtcataaatcggcttttcaatcgggcggtaattcaatagatcttgaatatgctcgattaaatagtcattatcaaacgcaagcggatgatcatagtttgtgttcagcctttcttcaaacggaagatggctttggtctttataataaaggtcctgctggatcattaaaattgagtgtcctttaaactgttcataaatggaccgtgtgacactcgtttttcctgaaccggaacctcctgcgattccaatgactactggattcttacccatgggctgttacttcccctttctcatcatgttgctcggataaatctttttgtctagtttgaatttgacaatttgcaggggatggcgggcagcatctagctcatttccgtcttcgtcccaaatggtttcaatcgtatgtgtaaagttttcgatttctggaccgaaaaattccacttcgtcgccttttttgaagaaattgcgctgctgaagcgtgaccatttgtgtatcttcatcataattcagcactaagccgacaaaatcatatgtcgttttcttggcgtgttcgccgaacatttgctcttcatagcctggcgttccttcaaagaaagctgtcgcagtgtccctgttggcgcacttatcaagctcttcaagccattctttttgaatcacaaagttttctggatcagcgcaataagcatcgattactttgcggtatacgctgacaacagttgctacatagtgaatggatttcatgcggccttcaatctttaagctgtcgatccccatttcaatcatttttggaatggattcaatcagcttcaaatctttcgggctcatcgcaaatggtgcatcttcttcaccatacaaagcaacggcgttggcaccgtctgtttggtagagatcataatcccagcggcatgactggcagcagcctccgcggttggaatcccgcgctgtcatgtgattgctcagcacgcagcggccggaatatgcaatacacattgcgccatgaatgaaggattcgatttcgatatctaccttttctttcatttctctgatttcaagagcgctagtttcacgtgccagcacgacgcggtcgagaccttcttccttccagaactggacagccttccagtttgaaagagactgctgtgtgctcaagtgaacctcaacattcggcgccactctgcggcatgtttcaataataagcggatctgccacaataataccggcaacgttggcgtctccaagcgcttttaaatagtcttcaagcccgtccatgttttcattatgagcgaaaatattcgttgttacgtagatcttcgcgccatatttctttgcgaattcaacgccttctgcaatttcttcgatcgtaaagttatcggcattcgagcgaagcccgtattcctgtcccccgataaagaccgcgtccgctccgtaatgaacagcgattttcagcttttcaagattacccgcaggtgcgagaagctccggctttttcgtaatcacacgctttccattaacgattgtggatattttatcatttacggcagtcatagcttaacctccttttgattaataaaccgtttccttgaagaagaatccggtatcaatttttctgtttactggctggatgctttcaatgcgttcgatccagtcttcttttttcgcttcgtattcgtcacggttttccacgcacaaatcaattgcttctctgtacattttggtgacttctattaggtattcaggcattttcaaaacaccatcgattttgaaagaatcaattccggcatctatcaattcctcgagctcatcaatgatgcacacatcgttcgggctcatgatgtgagtgccgttttcatcttcgaaaatcggatatttattatcgcgttctttatcgtgtaaaaacatgcctgattcttttttctttctttcaatgtccatgactttgccctgatattcaaaatagtttccaatcaaagaacgcttcgattggaacatgcacgtcattccatgcacctggatttcaatttcgacttcagcattttctttaatctcaacaatgctgtccatgtttaattctctggcaagcacagaacgcgccgcacccttgcgtccccagtagttgcatgtataatagttggtgcctgtcgtttctgtgctccaatgaagcttcagatcaggcgcagattcacgggcagccatcagcacggcaggatcgccgaataccgctgcatcgacaccggcttctgctaagaaagccagatattcgccaagctcacccactttatcattatggaaaattgcatttacagcaacgtatacttttgccccttctttgtgagcaatctctacggcttttgttacatcttcacgagaaaattctccggctaatctcaagccgtatctctgttccccaactaaaaacgcagttgccccagcctgtatgagcggcaaaatgtccgctgtactcgtcggcgtcactaagagctctggttttttcatgacgttcacctcttctttttactaatcgcaagtccgtccccgacaggaataatcgcagtttgataatccggatgattcatcagccaatgattatattcatcaattttggctacaagcctgcgccttctcttcggttctattttgctgtaatcctctgccaccagacctttaaacagcacgttgtctgttataatcaccccgtccggtgaaagcatcggttcatataaatgaaaaaagttttgatactgaccttttgcagcgtcaataaaaatgacatcgtaaggcgcggttacatgaacggcgtcggctaattcaagcgcatctccgtaaaaaacatgaatccggtcatcaagctgaaattccttgatattgtttaccgcttcttcatgccgtttctcattgcgttcaattgtatatatttcagcagacggcagttccagagccattcgaatggctgaataaccaatggccgttccgatttctagtatttttttcggctgtttcacagacaaaatttgaagcagcacctccatgcccgctttttccataatcgggacatgatgttcttctgcatatgcttcaagtctcttcacgttatccggccgaggctttaataatgcttctatatagtcatttatttgttcataccggtcagtcactacaaacagcctcccgttctaaaaaggagtgccccagtcttatgcgcaggacactctctgaatacatcatgatacatcggtaaacaacccgatatattttatcataaaaccttgcggaaagcgaacaaaaggagagctttttgctctccttttatttctcattttttgaggaaatgtatttttcttttgctttattatgctcttttagcgtttttgtaaatacgacctcaccatttgatttggccaagaaatacagatagtccgttttatccggatgcagcgctgcttcccatgatgacatgccggcattggcaatcggccctggcgtcagccctgtgtttttatacgtattgtatggtgaatcgatttccagatccttataaagaacccgatctttatgcttgcctgccgcgtacaggacggtcggatctgtttggagcggcattttctttttcaggcggttataaaagacgctcgcaattttatggcggtcggctttttcagtcgcttcttcttctatcaaagaagccattgtcagcagcttatgcacagaaactttgtttttcttcatttctgatttatatgtttccacataagaatttgtctgcttaatcattgccttgataatgtcttcaagtgatgtgtccggatcgttaaaagggtatgtagccgggaataggtacccttcaagcgggtgcttaatgtttttattgaaaacatcatttgtcacagtgtccgggaattctttcttcagctgattgataaatgtttcatcgtccagcttcgctatgacttgttttttagagtattttgtttcatcagcaatagcagccgcgatttgggtcagctgtgctccctcagtcactgtgatttgaaaagcgtaacctgtagccccgcttgtcagcttctgaataatggcatctaaatccatacctttattcagatggtagaatccggcctgaaacccggaagcacctttatatttcacatagtactgaaacgccttctcgctttttatgacatcatttttctttaatatcgatgcgatggctgaaacagacgaaccgctcggaatgttaatattaactgtcgttttactgtctttttcaacaggttcaagcaatgatttcccatataaaaatgccccgccaatgatgagaaacagcacaacaatggaagacagtatgattctttttttattaaaaaacgattttttttgctgattgatatacattaggtctcctcccatcagctcttatactacatgattcattgtatttcggcaatttattacaaaaagaggcctgcataaagcagaaaaaagccggagcagtatagctccggctttggtttggcgcgatgttttactcttcgtcttcgtccgctaagaatgtgtttagtgtttcttcgatcatatcccattcttcgtcagtttcaatcgggaatagctcaccgttttcaccgtcttcgtttggcgtgaagctggaagcaagaatttctacttcttcgtcatcttttgattcgattggatagtacaagacataagatttgccaaactcttcattttcaaatgtaaacagcacttcacaaagctgttcatttccttgatcgtcaacaattgtaatatttttttcgccgtgttccattttcttcacctctggctttaatttaagctgtcaagatatccttgtaaaatcataacagccgccattttatcaatgactttttttcgtttttgcctgctgacgtcagctgcaatcagcattttttcagccgccattgtggtaagacgctcgtcccacagcacaacaggaacattgtacgttgtttcaagcactttcgcaaatgtttggctggcttcgcctctcgggccgactgttccgttcatgttcttaggaaagccgagcacgattttatctatagtatagtcctttatcagttcagataaacgggataaaccataatcgccttctgcttcatttatctttatggtctcaatgccttgagcagtccagcccatttcatcgctcagagctacaccgagtgttttggttcctaaatcgagtcctaatattctcattctttatttacgcctctttatgctgttctaaataagactttaccaattcctcgattaattcgtctctttcaagtttgcgaattaaattgcgagcgtcacgatgcctaggaatataagcgggatcacctgacagcaagtatccgacaatctggttgattggattgtagcccttttcctgaagcgcgtcatacactgtaatcagcacctcatttacgttagtctcagcagaatcatcggagaaattaaatttcatcgttttatcaaacgagctcaccgttttgcacctctttcccaaattcgcaggcaaagttcagcctggggtcctaatcttaccatcattctacactacatgggcgaattataaaacggatttcacccaatcttctacagaagccaaagcttcttctaatttttccggctgtttaccgcctgcctgcgccatgtccggacggcctccgccgcctccgccgcaaacttccgcagcttgtttaaccagcatgccggcgtgaagtcctttctcaatgaggtcctttgtgactccggcagagatattaactttatcgttttgtaccgcaccaagcacgatcaccgcagagccaagctttgctttgagttcatcgaccatagtgcggagatgattcatgtcttttgcatttacttttgccgcaagcacgtttacgccgtcaacttcttttactttcgacaggattgctcctgcttccacgttgcctagttttgcaagaagagattcattttctctttgtgcatccttcagttcagcctgcagagccgcgacccgtttcggcacttctttgatatttgttttcagctcgtcagcggtctgcttcaatacagaaatctggctgttcatttcgacgtaagcgccttgtcccgttacagcttcaatccgtcttgtgcctgctccgattccggattcagaaacgattttaaacaagccgatttctgctgtatttctgacgtggcagccgccgcacagctctaagctgtaatctccaacttgaacgacacggacaatatcgccatatttttcgccgaacagtgccatcgcacccatttcttttgcttcagcgatcggtttcaaatcaatgctgaccgggatgctcgcccagatcttttcgtttacgattctttcaatttgttcgagctcttcttttgtcacttggccaaagtgcgagaagtcaaaacgaaggcggttttccgttacaagagagcccgcctgattgacatgagttccaagaacatcttttagagcctgatgcaataaatgcgttgccgtgtggtttttaatgacgccgcttctcatatggtcttcaacttcagccgtaacatgcaggcctttttgaacagtaccgctctccacaacaccttcatgcacatgctggccgttcggcgctttttgaacatctttaattcttacaactgcctgctcgcttcggagatagcctttgtcgccgatttggccgccgctttctgcatagaacggtgtttcatcaagaatgatttgaacgctttctccttcatgagcctcttcgattaattggccgtcctgaagaagcacaatgatattggcatcagctttggtttgagagtagccgacaaatgtgctttcaactgtcacgtcgcgcagtgcgccgccctgcacctgcatgctgccgacatcctggcgggcgtttcttgcccgttcacgctgctggttcatttcctcctcaaagccctcatggtcaaccgtcatgttctcgtcttctgcgtattcttcagtcaattcaaccgggaatccatacgtatcatacagtttaaacacatcagcacctgagataacgctgctgcccttgtctttttcttttttgatcatttctgacaggatcgcaagcccttcattaagggtctcatggaagcgttcttcctcggttttaatgacttttgcgatgaaatccgctttctctttcacttcaggatagaaatcagccatgatttctgcgacaaccggcactaaatcaaacatgaacggacgatggatgttgatcgttttggcataacgcacggcacggcgtaataagcgtcttaatacatagccgcggccttcatttgacggcagcgcaccgtcactgacagcaaaggcaaccgttctgatatggtcagcaatcactttaaacgcagtgtctttcacattgtctttgccatatgtttcaccagaaatcgattctgttgctttaatgatcggaacaaacaaatcggtgtcaaagtttgtcggaacattctggatgacagacaccattctttcaagacccatgcctgtatcaatatttttctttggaagcggtgtgtacgtgccgtcagggttatggttgaactctgagaacacaaggttccatacttccaggtaacggtcgttttccccgcctgggtaaagctccggatcttctggatcattaccgtatgcttcaccgcggtcgtaaaagatttccgtattcggtccgctcggcccttcaccgatatcccagaagttcccttccagacggataattctttcttcaggaataccgatttttttcgcccaaaactcatatgcctcttcatcttcaggatgaaccgtaacagagagaagctctttgtcgaagccaatccacttgtcgctcgttaaaaactcccaagcccatgtaatggcttcttctttgaaataatcgccgatggaaaagtttccgagcatttcaaagaaagtgtgatggcgcgcagttttacctacattttctatatcgtttgttctgatcgctttttgagcgtttacgattcttggattttccggcacgacacggccgtcaaaatattttttcagcgtcgcaacaccgctgttgatccaaagcagtgaaggatcctcatgaggcactaatgacgcgcttggctctaccgcatgtcctttttctttaaagaaatccaaaaacatttgacgcacttccgcagaagttaagtgtttcattgtatttcctcctctataaaaatcgaaattctcttcagtgacagcaaaaaagccctccccctatgcaaaccaacgtttacacagggacgagagctgtctcgcggtaccaccctgattacgggcattcatgcgcccgtcacctttaaccctgtaacgcaggataagcggcagtgattaactgcactcaggattagcttcctccgatcttctgataaagctcctttcagcttatggagcttctctctttaacagggcttcggcgtactcagatccgtcactcgagattcgtatgtattctacgagaaattatagacaagcggcacgccgatgtcaatgctccgtcctcatccgcaaaaaatggatcatcattacttttaaaacagccgtcgcaggaacagccagaatcatcccgacgatacccgcaagctcccctccggcaaggagtgcaagcatgataacgaccggatgcattttaaggcttctgccgacaatgaacggactgaggatatttccttccataaactgcagaataaacaccgtaatcaccacaacaagaaccgccttgactgagatcgtcatcgcaattaacaacgcaggaacagctccgatgaaagggccaaaatacgggatgacattcgttaccccagagataaggccaagtatcagcggatacggaagcccaaatacccagaacgaaatgcctgcaatcacgccaagaatcaagcagaccaaaagctggccgcggatataatcgccaagcgaatcatccacatcccgcaaaaaggcgctgccccgctttctccacgacttcggagtcaagtaccatactgtctttttcattaactcaatgtccttcaccatataaaacacgagaaaagggattgttgcagcaattaagaagtaatcaagcacattgcggatcccgctgatcgcaccctcgatcgttcccgcaaaaaacgcctccgtctggcggatcattttatctatacggtgatgcataccatcaggccagtcatccgtatggttatgcacatgaagaagaagcccgttatacgtttcggcaaacatgggtatattttctgacaaatccgtcagctgcacgattaaaacaggcacccctttatacaacgcccagccaatcccgccaaaaaaaagaacataaatgaccaagatgctcaaagtcctaggcaatcctttgccatgcagccattctgtgaccggaagcaataaataagatataaaaatagaaatgatcaagggaataaagatcgtttttatgacgagccaaaagggtgaccataacatatcaagcataaaaaagacatagactgttaacagaaccagcaaacaaatagccacccacaacaaaagctgcaccggtttttggagcatctgctttcacctcacctatatcttttgaggtttacaaggaattattctttatgtttctttagtcagtcagaagtcatggacattttttcacttttaattttcagaaaagtttgatcatttactttttggtcaaattttctgataggaggattgcgatgatcacatttcaaaatgtaaacaagcattacggagattttcacgtgttaaaacaaattaatcttcaaatcgaaaaaggtgaagtcgttgttatcatcggcccatccggttccggtaaaagcacattgctcagatgcatcaacagacttgagtcgatcaatgagggagtgcttacagtaaacggcaccgccattaacgacagaaaaactgatatcaatcaagtgcggcaaaatatcgggatggtgtttcagcactttcatttatatccgcataaaacagtgctgcagaacatcatgctggctccggtaaaagtgcttagacaatcacctgaacaagcaaaggaaacggcgcggtactatcttgaaaaagtcggcatcccagacaaggctgacgcctatccttcccagctttccggcgggcagcagcagcgtgttgccatcgcaagaggactggcgatgaagccggaggtcatgctgtttgacgagccgacatcagcacttgatcctgaaatgatcggtgaggtgctagatgtcatgaaaacactcgccaaagaaggcatgacaatggttgtcgtgacacacgaaatggggtttgccaaagaagttgccgaccggattgtcttcattgacgaaggaaaaattttagaagaagcagtgccggctgaattttacgcgaacccgaaggaagaacgggcccgcttattcttaagccgtattttaaatcattaaaacagaaatggggagcttgtatgaaaaagattttttctttagcattgatttctttattcgctgtcatcttgcttgccgcttgcggcagcaagggatcaaacggagaagcctcaaaggagagcaaaaaagatacgctagccgccattaaagacaatgacaaaattgtcttcggcgtaaaaacggacactcgactgttcggtcttaaaaatccaagctcaggtgagattgagggttttgatattgatattgctaaacaaatcgctaaagacattttaggtgatgagaaaaaagctcaatttaaagaggtcacctcaaaaacaaggattcctatgctgcaaaacggggatatcgacgccattgtcgccacaatgacgatcactgaagaacgaaaaaaggaagttgacttttctgatgtctatttcgaggccgggcaatcgcttctcgtgaaaaaaggcagcaaaatcaagagtgtcgagaatcttggcaaaggctcaaaagttcttgcagtaaaaggctccacctcctctcaaaacattcgtgaaaaggcgcctgaagcatctgttttagaatttgaaaactacgcagaagcctttacagcccttaaatcggggcaaggcgatgccctcaccacagataatgcgattttatatggaatggctgatgaaaataaaaattatcaattaacaggaaagccttttacagatgagccttacgggatcgccgtgaaaaaagggcaatctgctctcgcgaaagaaatcaacgcttcacttaaaaagatgaagtcggatggcagatacgatgaaatttataaaaaatggatcaaagaagacccagctgaataacaaccatcccgggatgagcaggcgatgctcatcccaatttgataaggagtgaataggcagatgaatgtgtcaattcttttcgataacttcagcatgtatatggacggtttttaccataccttgctcgcaagtgttatcgcgctggccggcagttttgtcctcggcgttgctgtagcggttatgagaataacagtctttaagccgctgcaatggctcgggaccgcatatgtagaattcatccgcaacatccctcttcttttaattacctttgttttctatttcggacttccaaacgcaggcctgaggcttgacggttttcaagcgggaacggttgctctcaccatttatacctctgcgtttatcgctgaagccatcagagcaggcatccagtctgtttcaaaagggcagatggaagcggcacgctcgtcaggctttacctacagccaagccatgctccatatcattttgccgcaggcaatcaaaatcgtcattccgcctttaggcaatcaatttttaaacttagtcaaaaactcttcgattcttggggttgtggccggattggatcttatgtaccaagccgatttagtttcgtcgagcacactcgttgtatttgatgtttatatttttgtggcgcttttttacttagtgctgacgattccgcttagcatcggtgttaactatctggaaaaacggctggaaaaaagctattgataaggagtgagttacattggatttcatcggtgcttattcacaggagcatttagcgtttttatgggatggctttctcgtcaccttgtacgttgctttcatctccatcattctgagctttttcttcggtttaatcgcaggcaccctgcgttatgcgaaagttcccgttctttctcaattgattgcagttctcgttgaaacgatcagaaacctccccttgctgttaattattttctttacgttttttgcccttccggaaattgggattaagcttgaaattacagctgctgcaattacagcactaacgatttttgaatccgctatgctatctgaaattatccgaagcggactgaaatcaattgacaaaggacaaattgaagcggcgcgctcctccgggctgagctatacacagaccctgttctttatcgttatgccgcaagcgcttcgccgcatggttccgcccatcgtaagccagtttatttctttattaaaagatacatcgctcgctgttgtgatcgccctgcctgaactgattcacaacgcgcaaattattaacggccaaagcgctgacggcagttattttttcccgatctttttacttgcggcccttatgtatttcgcagtcaactacagcctttcactcgcagcaagacgcctcgaggtccggcaaacatagaaaaggatactctttggagagtatcctttttgcattaaaacattttcgtaattcttcttctcatccgcttcatgcttcgattattcagcatgtcagattgagtcgccattcggtacacgagagctccggctcccattgccaaaagagaagtcatcgtccgattcatcctgcgcatctcctttcatgattaaaaattgatgctgcgttcatcctcagaaaacaaatcatccaagctgcttaacgttccgtcttcttccacctgatgagttgcaatcttccctttcgccactgtcagttcaataaaacagccccagcaataatattggttcacgccgattttgccgatatccttacttttgcaattcgggcatataagcatacctcacacctctatccgttcagaacgatctcgtctttccgcacctcgacaagcgaatccgctctttggatctggcgcttgcttcccgcaaggtcagaaaagaaaccgtccgagagttcatatgctacgattatgcccctgtccaaacaaaagtatacatcttccagcatccccaatatatcgccctcttgcgatttcacaagcttcatcttcatctgctcgtatgtgaagcatgatttcggaagaggcaaaagctgttctgaactgaccgaagccaatatgcggtcatcaagaatggaagagatatcacacgcccgtaatagcgcatgatgatgatgcaaaaagcgtttttgtgcaagaataaacccaagacaatctcctttcagagaaaaacaaatatcggaaattgccccgagataacaagaagttcgttctgagtatactgggaatccttctacttcatggcatgttctcaaagtgtgatcaaccaccttttgttgaacaggcttaggttttgctttgcgccttagactcatacgatgaaatcaattccactgcaaatgaaaaaaactcccgcttgcacgggagcattttattgctgttcttctttcataaaatcgaatggtgtaatgccttccatgccaatgttggcgtcgtgtacgctgaacgggagctctttttggagagcctcaagctcggcatccatttcctcaacctgtacggacagcctgttttttaaggaggtctgtctgacagttgcatcattatttttcacgccccactccagcgcctcctcttccccgcataaaatgagaaatttcttcgctcttgtaatcgcggtataaagaaggtttcttctgagcattctataatagcctttcacaacaggcaaaaccacaatcggaaattcacttccctgcgatttatgaatagaacagcaatacgcatgggtaaattgattaaaatcttttttcgtaaatgtcatttcattgccgtcaaaagaaacgacggccatgtcttctttttctgtattttcctttgcataaaatatcgacgtgatttcgccaatatctccgttgaacacattgttttccggctgattgacaagctgcaaaattttatctccggttctgtagacaacatccccgaacttcaattctctccgtttttctttaggaggatttaaaatgtcctgcagcatcacattcaattcattaatgccggcttttcctctgtacatcggagcgaggacctgaatgtcctttgctgtatagccttttttcaatgcattggcgacaaccttctcaactacttctttgatttgcgacccgccgcagcgaataaaggaacggtcctttgtcggggcagtcaaattgttcggcagcaatccatttttcatctggtgggcaagctcgacgattgatgacccttctgcctggcgatagatgtctgtcagtctcacagtcggaatcacctgggatgccagcaggtctctgagcacttgtcccggaccgacggaaggcagctggtcttcgtctccgacaatgatgatttgtatatgatcagggatcgccttgaacaaatgattcgccagccatatatcaagcatactggcttcatcgataattaacagcttcccttcgatcggctgatcctctgtatgagtaaagccttcagcaccgttccagccaagcagcctgtgtatcgtaactgcaggaagtcccgttgattcactcatccgttttgctgctctccctgtcggagcggccaaaacaatcggaaaagcttcatcctttttataagctgacggatctagtgacacaccgtgaagctctccgtagagctcgacaatccctctgattaccgtcgttttccctgttcccggaccgcctgttaaaagaagcatcggcgaggaaagggctttttgaatcgcttccttctggctgggggcatactgaacgttcatccgttcttccagttctcccaacgcgagcaaaaactctgattcgggaaactggttctcatattcggtttggctagcgatatgtttcacacgctttgcaacgttttgttctgcgtaaaacagcgaaggaaaataacagcggccatcttctatgacaatgtctttattttctccaagggcaataatcgcgttagcggcatccatttctgtgatgcgctgcccttcccttgctgactggtttaacagagattgggtgtcaatgatcagctgttccgtttctatgtacgtgtgcccctctgacagacaagtcgtttcaagcgtgtacaaaatagcagcttttacccgctcaggatggttacccgaaagacccattctgctgcccagctcatccgctttcccaaacccgatgccttctacatccttcacaagctgataaggattttcctgaatcttttcaagcgtctcagattcataggcttgatagattttcatagacagctgcgggccaaaaccaaactgattcaaggaaatcatgatttgctccagtccctgatgccgctgcaatgcgccagccagcgtgtcggctttcttttttgagagtctgggaacatcataaagcactgaagcgtcagccaatattttattaatggcgctgtcgcccagctttttcacaatttcttcagctgtttttttgccgatcccctcgaataaatcactcgataaatattgaatgatgccttccttagtcgttggaatctcctttttgaaatgctccgcctgaaattggagcccgaattttggatgagttacgatctttccgtaaaacgtgtaggtctcttcttcttgaagcgcagggaagtagcccgtcacggatacggctttatcttcaatggcttcggaggtctctgtgactttcactttcagaaccgtatataaattggtgtcattatgatagatgactgtgttgactgtcccttttaaatagggctcttcctccagtttaagctgatccggatgctgctgcacgagctgtccctcctcctgtgcctgttatgatggatcaatcagttttttagcatgaagcgcaagcatatgatctggctggatatcgattgccttgtccagcatttccagcgctttttctcggttttctttataagcataagcgacaccggcattataaaatgcatctgcatgccccgggtcttgctctgtcacagctgagaattggctgagcgcttcgtccagcatgccctcgttggctaagcacatcccgaattgaaagcgcgcttccgtatcgttttcattcagttcgactgctctttgtaaatatggcagtgcaagcttaggctgttcgagcttgacaagcaccgttccgagcatgtaaaacaggtcgccgttttccatccccgcacgaagcgctttttcaaacatgtctttggcttctttgtacatttcttttacaacatagacatttcctgctccataataagcagtggctgcgctactgtctaattcaagcgctttatcataaaacgcaagcgcacgttccagctcgtttacggatgaaagaaggttggcaaaattgatatacggaatcgcgtcttctttattttcttcaatcgcttttgtaaatgcctctgccgctttctcgtaatcgccttcctgcatcgcctctataccgagttgattataatccaccgatcatcttcctttcattaaaaaaccccaactcagtgttgaggtttttcatcttttatacgtaccacaattttgttccgtctttgtacacatcatcaattgtcccgccgccaaggcattcttcgccgtcatagaagacaacggcttgtcccggcgttacagcgcggacttgttcatcaaagatgacttccgcttcaccctcgccagtcatgcgcaccgttactttatgatcttcttggcggtaacggaatttagccgtgcaggaaatctcttcgcccttcatgatatccgaacgtacccagctgatatttgttgctgtgattttgtcagaatataaaagcgggttatggaacccttgatccacgtagaggatgttcttttcaagatctttgcctaccgcaaaccacggctcgccgcttccgccgatgccaaggccgtgacgctgtccgatcgtatagtacatcaacccgtcgtggcggccttttacttcgccgtccatcgtcatcatatcgcccggctgtgcagggagatattggctgagaaacgttttgaagttgcgttcgccgataaagcagatgcctgtactgtcttttttcgtcgccgttgcaagttctgcttctttggcgatttcacgcacacggcttttttgaagttcgccgatcgggaacatgactttgctcagcgtatcttctgtcagctgattcaggaagtacgtttgatccttgttttcatcaatgccgcgcagcattctgacttttccgccgcttctgtctactcttgcatagtggccagtcgctaaatagtcggcgccaagtgacaatgcatgctccaaaaaggctttgaatttaatttctttgttgcacaatacatccgggtttggtgttctgcctgctttatattcatcaaggaagtattgaaataccttctcataatattgcttttcaaagtttacggcataatacggaattccgatttggttgcagacgcggatcacatcttcataatcctctgtcgccgtgcaaaaaccgttttcgtccgtatcatcccagtttttcataaagattccgattacatcatagccctgttcttttaacagcagggccgccacagatgagtctactccgccggacatgccgacaacgactcttgtatcctccggccgtttttccatttcattcactccaattactacgccgccttattgtgtcagccgtttgacaacgtcggccacatgtttggcagcagttttcacttgctcagccgtattgccgaggccgaagctgattcgaatagaggacgtcagccggtcactctcttcgccgaacatagcagtcagaacatgtgacggcaggactgaaccggccgtgcacgctgaaccgctggagacagcgacaccagccatatcaagattaaccagcagcgcttccactgacacaccggggaaataaagattcagaacatgcggcagactatgctctttgtccccgttgacctcgaatgccacacctgcatctctaagcgtgtcggcaaagattgctttaaacgattgatacttctcgtttttttcgtcacgttcttcacttgacagcttgatcgcttctttcagcccgacaatgcctggaacattttccgttccggcacggcgttttctttcttgctctcctccgaataaaagcggtgaaagcttcacatctttactagcatataaaaagcctgtcccttttggcccgttgagcttgtgcccggaaacagacagaaggtcaatatggctgtttttcacatcaattggcagcaacccgaatgcctgaacagcatcggtatgaaaataagctttgtgttcctttaacagctcaccgatttcttcgatcggctgcactgttccaacttcattatttccatacatcactgtcacaaggattgtatcatcacgcagtgcttctttcacctgttttgcactgactcttccattttggtcaacgtccagatacgttatgtcaaatccgtcttcctcaagtttttcacatgtgtgaagcacggcgtgatgctcaatttttgttgtgatgatatgtctgccaagatcttttcttgcaagtgcggttcccatgatcgccaagttatcagcttccgttcccccgcttgtaaaaatgatctcctgctctgccgctccgatttctgctgcgatctgcgctcttgcttcatccacccattttcgagattctctgccaaatgaatgaatactggagggattaccgaaactgccggagaagtgcggtatcattttttccagcacgcgctcatccatcggagacgttgcggcatgatctaaataaatccgttccattatgtttacacctctgatctaaatatagaacatataagcttcttgctctccgtctgtatagctggcaagatcctctaatgttgtactgtctaaaacctcttttacagcatcccggatgcgaatccagagctcacgcttggcaggctcctcatcttccagcacttcaacagggctgatcggcccctcaagcacacggataatatctcccgcagtaatggcatccggctcactgcctaatacatatccgccatatgcgcctctgatgcttttcactaaaccggcatttctgagcggcgataccagctgctccaaataatgctcggacaaattattcgtctgtgcgatgctttttaatgaagtcgggccttcaccgtgcttttttgcaagctcgatcataatggtgagcccgtatcttcccttagttgatattttcaacatgaacacctctgttatttcatgattttccacatttataatggtaatttctatatgtttcgtccgtttattatcttatagaccaactgttattataacataccttcagcgaattttcattgaggcagaaggaaaggggcctttacccttttctaatgtacggttttccgttaccctgtaattaagtaaggagagatgatagatgaagccattggcatatcggatgcgtccgacaaaaatagaggatattatcggccagcagcatctggtggctgaagataaaattattggcagaatggtccaggcaaaacatttgtcatccatgattttgtacgggccgcccggaattggaaaaacatcaatcgcaacagcaatcgccggttcaacaagtattgcttttcgaaagctgaatgctgtcattaacaataaaaaagatatggaaatcgtagctcaggaagccaagatgtccggccaagtgattttgattctggatgaagtccacaggctggataaaggaaaacaggattttctattaccctatttagaaaacggaatgatcattttgatcggagcaacgacggctaacccgtatcatgccattaatccggcgatcagaagccggacccagatttttgagcttgaaccgttaacacctgatctgattaaacaggcactggaacgtgcgctccatgatgagcatcggggccttggcacctattctgtatccattgatgatcaggcgatggagcattttgcccacggatgcggaggagatgtccgctccgctttaaatgcgcttgagcttgccgtgttgtcaacgaaggagtcagcagacggtgaaattcacattacattagaaaccgcggaagaatgcttgcagaaaaaaagcttttctcacgataaagatggtgacgcgcattatgatgtactgtccgcttttcaaaaatcgatccgcggctctgatgccaacgctgctcttcactatttggctagattaattgaagccggtgatctggagagcatcgcaagacgattgcttgttatcgcctatgaagatatcggtttagcaagcccgcaagccggtcctagagtgctgaacgctattcagaccgctgagcgagtcgggtttcctgaagcgcgaatcccactggccaacgcagttattgagctttgcctctcaccgaaatcaaactctgccattctggcaatcgatgaggccctggcagatatcagagccggaaaaattggggatgtcccgaagcatttaaaagacgcgcattataaaggagctcaggaattaggaagaggaatcgactataaatacccgcacaattacgacaacggttgggtcgaacaacaatacctccctgatcctctgaaaaataagcaatactataagccgaaacagacaggaaaattcgaatccgccttaaagcaggtgtacgataaattaatgaaaagaaaataaaacaaaaacagccttgatcatcaaggctgtttttatgcattatttatccttcacacgtttgatttcaatgtctttcaaaagatccatgacaacatgtccgcccataatcaaacctgcaactgacggcacaaaagcattagaggaaggcggcatttttgctttacggattttcgcttcgtcattccccacttcttttctgacatcttcccgaatgacaatcgggctttcatcagagaaaatcacttgaacgccttttttgataccctccttgcgtaatttcgtacggacgaccttcgcaattggatcagtgtgcgtttttgagatatcagcgatttggaagcgtgtcggatccgttttatttgcagcacccatgctggagatgagcggaatatcccgtttcagacattccttcattaaatgaattttataacaaatggtgtctgacgcatcaatgacatagtcaagatcatagtcaaaaaactgctcatacgtttcctccgtatagaacatttttaacgagattacttcacactccgggttaatgtctgcgatccgcgccttcattaaatcaactttcggctgtccgacagttgaaagcagcgcgtgaagctgacggtttacatttgtaatgtcgacatcatctttgtcgacaagcagaatgcggccgacgcctgaccgcgcgagagcttccgccgcgaacgacccgactcctccgactccaagcacagcaactgtgctgtttttcagcgtttcaaggccttcttttccgatagctaattcattgcgtgaaaactggtgtaacaagaacctcactccacattcgtattctggtttcatctataaaatggctgatccatgagcagccgtttttctgcgcacaaaaaataaagtcccaatagtgccgttgcagctttcctttgttttgaacccgctctcagcaggtgggtgccctcttttaaatcttgtaagtcctctttaccgaatgaaaagaggcatgtacgccatttaaaaatgcgggctcccaaatcaaaaaaatgttcggtcaaaactaggtgtacaactaacacatcaggactttatttaacttgtcaaaatcatatcacagacgattttgattttcaagaatccaactgcacattcagttcttaacttttttcttgatagaaagatgaagctcgtcaagctgagcgtcacttacttctccaggcgcctctgtcatcaggcagcttgcacttgccgttttcgggaatgcaatcgtatctctcaggttcgtacgtcctgcgagaagcataacgagacggtctaagccaagtgcgattccgccgtgcggaggagcgccgtattcaaatgcttccagcaggaatccgaactgttcagccgcttcttctggtgagaagccgagaagcgcaaacattttttcctgaatatccttttcaaaaatacggattgaaccgccgccaagctcatagccgtttaagacgaggtcataagcttgtgctttcatgtcttcaggcgctgtttcaatcagctcaaggtcttctcggacaggcattgtgaacggatggtgtgctgcgtaaaaacggccttcttccggatcatgctctaataacggccagtcgatgacccataagaaattaaacaatttttcgtcaatcagcccgcgctctttcccaagctttaagcgcagggcgccgagtgatgcggccacaacttcgaattgatccgctccgaacagcagcaaatcaccttcagcagcatcaagtgcttcaatcagcttagactgcttttcttcatcaaagaatttagcgatcgggcctttcactccgtctgcctcaaccttcacccaggcaagcccttttgccccgtagtttgcagcaaaagcgccaagagcgtcgatgtcttttctggagtaatcgccggcaccgccttttacgttgatggctttaaccacgccgccgtttgctacagctgatgagaacactttaaattccgtatcctttacaatgtcagacacatccgtcaaaagcatgtcaaaacgcgtatccggtttatcagaaccgtacttgttcattgcttcgtcatacgtcattcgaggaagaggaagcttaagttcctcaccttttgtttcacgcataacctttgccatcatctcctcagccaatgacataatgtcttcctggctcataaaggacatttcaatatcaatttgcgtaaactcaggctgacggtccgcacgcaagtcttcatcgcggaaacagcgggcaatttgataatatcgttcaatgcctgataccatcagaagctgtttaaatagctgcggggactgcggcagcgcatagaactcaccttcgtgcacacggctcggcaccaagtagtcacgtgcgccttcaggcgtgcttcctgttaaaatcggcgtttcaatatcaagaaacccattttcatctaaaaagctgcgaacagctttcgtcacgttatggcgcagctgcatcgtctggaacatagccggtctgcgcaaatctaagtaacggtgttttaaacgaacgtcctctgacacttcttcagcttgatcagaaatcgcaaatggaggtgtctttgcagcatttaatacgttcactccatcagcatgtatttcgatcgcgcctgttttcaaattcggattaactgttccctcttcacgcgccaccacttttccttgaatatcaagcacgtattcatttctgatgccttccgcgatagcaagcgcttcttttgacacatcagggttaaaaacgacttgaacaatgcccgtacggtcacgcaagtcaataaaaatcaatccgccgaggtctcgtcttttttggacccagcctttcagcgttacagattcgccaattgctttttcagttatatcaccgcaataatatgttcttccaaacaatgcgtttcactccttatcccttttggtttgccttcatcacatgtataaattcatcaagtgccacttcaatctgttcgcccgtctgtgcatcctttacattgattttgttttgggcaagctcatcttcacccaaaatcgcaataaatctggcctttaagcgatcagctgttttaaactggcctttcattttcttattttcataatcgatttcactggaaatgcctgcttctctcagtttgtacaccaatgaaacagaataatcctttgctttttcgccgagtgtgacgatatagcagtcgattcccttatcaacaggcagctctcttttttcagcatcaattgcggcaagcaagcgttcgatgctcatcgcaaatccgatgcccggtgcttcaggtccgccgatctgttcgacaagcccgtcgtagcgtccgccgccggcaagtgtcgtaatcgcgccaaagccctccgcattgctcataatttcaaatgcggtgtggttgtaataatccagccctctcacaaggttcggatcgatttcatacgaaatgccaagatcatttaagtattgtttcactttttcaaaataagcggctgattcttcatttaaatatgtcaaaatcgaaggtgccgatttcatcagctcatgatcacggtcttttttgcagtccaaaattctaagcgggttcgtgtgcagccgggactggcagtctgaacaaaattcttcgatgcgaggctcgaagtgtttcacgagcgcttctctgtagcttttgcggctatcttgatcgccgagactgtttatgacaagcttaacgttttctaaacctgctttttcataaatactcatcgcaagcgccattacttcagcgtcgattgcagggtctttcgaaccaatcgcttcaattccaaactgataaaactggcggtaacggcccgtctgaggacgttcataacggaacatcggcccgacataataaagctttgtcggctgtacaggatttgcgaacagcttgttttcattaaaagcgcgaaccgcagcagctgttccctccggacgaagcgtcaggcttctgcctttgcggtcctcgaaggtatacatttctttttgtacgatatccgttgattctccgacgcctctggcaaacagttctgtatgctcaaaaatcggtgtgcggatttctttatattgataagtgcggcaagtgtctctcataatttgttcaacaaactgccagcgatctgattctccaggcagaatatcctgtgttcctctcggaatgttatatcccataggtagacctccttatgtattccttataaaatatccaatgatcgttaatgatgaaaatgaaaaaaactcccgcccctactatacatgatagtagggacgagagttatacccgtggtgccaccctagttggaatacgttcatattcccgctcgatcctttaacgcaggttcacgttcactgcctaatggcgttattcacgcgttcagcaggaaacctccggagtgttgtttcgagaaagacgcaatgggatccgctttcagcctggggcgggttcctctctaatcatgcaatctgacctactcttctccattattggttcaaatctttcatcatttgctatgtactcaatttctattataataatgggattggggttctctgtcaagctttattccggttgtttttcctcagcgctgcttctttggacataagaccaaattcagatgctgtttccgtaagataaccagtcgtatcgggatctgcgtgatcgctgtaatgcagattcgcttcaccgtcgtgaaatgcacgtcccatttttggatgatatttcatgatttgcacacctttttgattgtatttacgcttagtataaacaaatcattttatttttatttaaaaatcagaaaggactttacgatattaaacaagaatgcttttttaatgatcatcagaaaggaggacacaatgaacaagaaatactttgtccttattgtatgtattattttcacctcagcgctattcccgaccttttcatccgttacagctgctcaaggagaagcggtcatcgcaacagatgaaatgaacgtcagaagcggcccagggcttagctacggcattacagcggaagtaaaaaagggagaacgctatccaattttaaaggaagatggagactgggtgcagatacagcttggttctggagaaaagggctgggtagtctcctggcttattacaaaggaagaccaggccagcacaagctcctcaggaagcagtgacactgtgacatcaacagaccccgatctgcggatgagaagcggcccgggcacttcctacgaagtcatcggcaaattcccgcaaggcagccaagcatctgtcattgataaagattcgggctggatcaagatatcctatcacagtgccaccggatgggtatcatctgaatatgtcacatcaggaggcagcagttcagcgtctgatgagagtgaccaaaccgaggattccggtgcgtcaacgacgggcacagtcggtgtttcttcgctaaatgtaagagcctccgcctcacatgacgcggcaattataacaaaacttgatcgcggaacgaaactgacggttctcaacgagaaaaatggctgggctcacattgaggtgaacgggctaaaaggctgggttgcaagccattaccttttgactagttctgttccagctgatgattcagcaaatgccggcagttcatcctccgctaaaaaagcctatatcatgtacggaggaacgaatctaagaagtgatgcgtcaacatcagcttcgatcgttgagcgcgctgccaaaggagattcatacaccattaccggttcaaagggaagctggtatgaaataaagcttgataacgggcagactgcttatgtagccaattgggtggtccaaacgtctaaaagcgcagaagaagcaggtgaaccgccagtctctgattccccgtctggaaacggctctctaaacaataaaacgattattgttgacccgggacatggaggaaaagacagcggaacgatcgggtattcggggaaattcgagaaaaacctgacgatcaaaacggcaaaactgctcgccagcaaacttagatcggctggagcggatgtatatgtgacacgccaggatgatacctttgtcagcctgcagtcacgggtctctacctctcactaccgtaacgctgacgcctttatcagcattcattatgacagctatgcggatacctctacaagaggcagtacagcatattactacagtcctgccaaagatcaggaactcgcatcagatgtccactcagaagtggtgaagcgttcttccattccagaccgcggcgtattattcggagattattatgtgctccgggaaaacagacagcccgctatgctgtacgagctgggatatgtaagccatccgcaggaagaagccattgtacatagcaattcataccaagaaaaagtaacagatgggatcgaaagcggattagagaaatacttccaataaaaaaagctgccttttggcagctttttttattttgaatccataatgagcgtgaccggtccggagtttgtaagctgaacatccatcattgctccaaacgttccggtctccactttgattcctttttcacgaagcaggtcattccatttttcataaagacctaaagctttatcaggtttggccgcgttcatgtagttcggccggcgcccttttttcgtatctccataaagcgtaaactgtgagacggataaaatctctcctcctatatctacaagagacagattcattttcccttcactgtcatcgaaaatacggagattgacaactttatcggctaaataagctgcatcatcttctgtatcatcgtgagtgatgccgaccagcaccataaggccttgtccaatttggccgacgacctcttcgtccactgtaacgcttgcttctgttactcgctgaacaactaatctcattttctaacccctttagttcatgacgcggcgcacagagtagatatctctaatctgtttaatacgctcgacgactttgtgcaagtgattgatattctgtatgaaaatcgccatatggatggttgccactttattgcgatccgatttgccagagacagatgaaatattggttttcgtttcattcactgcctggagcacctcgttcagcaatccgcggcggtcatacccaagaatctctatctcaacattgtattccttgcgcttttgaacttgtgactcatgctcccactctaccgggatcagccgctcttgggcttcattcgttttgacattcggacagtcttcgcgatggaccgaaacccctctgccttttgtgataaagccgacaatatcatcacctggcacaggattgcagcattttgataaacggacaaggaggttgtcaatgcccttgacacgaacgccagcttcccgttttcttccttgcgggtatggcttaggttccccagtgacttcctgaacgatcttttcctgttcttcctgatcgcgctgctttctctctttttctgttaggcggttcgccacctgcagagctgtgatgccgttgtaaccgaccgccgcgtacatatcctcttcatttgagaaattaaatttgtcagcaaccttttgaatattctccggcgttaaaacatccttcaattcaaaatccaagtttttaatttctttttcgaccagctcacggcctttttcgacattttcttcacgccgctgtttcttaaagaattgacggattttatgcttcgcttgggatgtttgggcaagcttcacccaatcctggctcgggccgtaggaatgcttagaggtgagaatttcaacgatatcacctgtccgaagcttatggtcaagcgtaaccatttttccgtttactttggcaccgattgttttattgccgatttcagagtgaatccggtaagaaaagtcaatcggaacagaaccggacggaagctcgattacatctccttttggcgtaaagacatacaccatgtcagagaacaaatcaattttgagcgattccataaattcttctgcatctgtcgattcattttgaaattctaaaatttcacggaaccaagaaagctttttctcaaaggttgcaccttcattggctgctttcccttctttataagcccagtgagccgcaaccccgtattccgctatttcatgcatttcaaaggtgcggatctgcacttcaagcggatcgcctttaggcccaataaccgttgtatgaagcgattgatacatattcggcttcggcattgcgatataatctttgaatctgccgggcatcggtttccagcatgtgtgaatgatgccaagcaccgcgtagcagtcctttatgctattcacaagaatacggacagccagcaaatcgtaaatttcattgaattgcttattttgcagcaccatttttcgataaatgctgtaaatatgtttcggacgtcccgagaagtcagccttgatatttacttcttcgacacgtttcttcacttcattgacaacctcatcgacataaagctcacgttctgcacgtttcttcttcatgaggttgacaattctgtaatattgctgagggttcaaataacggagcgccgtatcttccaattcccacttaatttttgaaatcccgagacgatgcgccaaaggagcaaaaatttccagcgtttcattggagattctccgctgtttttcctgaggcagatgtttcagtgtccgcatattgtgaagacgatccgccagcttgatcaatatgaccctgatatcttgagccatagcgacaaacattttgcgatgattttccgcctgctgttcctcttgagatttatatttaattttgccgagtttcgttacgccgtctacaagcattgccacttcttcggaaaatgcttctttcaggtcatcgagcgtcacatctgtatcttccacgacatcgtgcaaaaatccgcccgcgattgtggaagggtccatttcaagatcaacgagaatccccgcaacctgaatcggatgaataatatatggctcgcccgatttgcggtattgctcgcgatgagcatcttcagcgtacagatatgctttttcgacaaatgcgatatgctcatcagatagatagctgcgcgctttatctataacttgctcggcagtcaatacttgttcgttcgccatggaatcaccttttttaaaatgtaaactgtattgtagtttattatcaagaaaaaaacgaaagatgtaaagagcagaagttcaaatagccaaatattatataaaataaatgcaaaacaataggaaaaaagcaccctgacatggagtgctttttcgttatgcggttatccttagtatttcatcaatgttaagatgtcgtaatcttcgagcttatttctgccgtcaaggtaagaaagctcgattaagaaagcgataccagcaacaacgccgccaagttcttcaacaagtttgattgtcgcttcaattgtgccgcctgtcgcaagcaggtcatctgtaataagcacacgctgaccaggcttaatcgcatctttgtggatcgttaatacgtcttttccgtattccaagccataatccactttgattacttcacgaggcaacttgccttctttgcggaccggcgcaaaacctacgccaagcgcgtaagcaacgggacagccgataataaagccgcgcgcttcagggccaacgaccaaatcaatttgcttttctttcgcatattcaacaatttgatctgtggcatagcggtatacatcgcctttatccatcagtgtcgtaatatctttaaattgcacgccctctttcgggtaatccggtacaattgttacgtattgttttaaatccatctgttttatgtcctcctcgtactttcataagcctctgaatcttgtttcatcagcttattcagccattccttcagctcttcagcagaagaataattcagcttttgatccagttccatcagctgctgtttcgcctgatatgtttgtgagtctgttaagtcgcgtttctttgctccgctcacaacagacagcacaccattctctattttaacaaaaccgagatcaaaaaacacctttgtcatgaaattgattgtttcaacggaccagcctttatgttttgcaagctctgaaccgtgttttttcacgtcaaaagcgcctcttttcagcaagaacgcataataccatttaaagtggtctcttgcgggaaaagttgataaaaagtggtcctcatgattgagaaaaataaaatatatccgctcgggcgcctttccttccagcaaacgtgcgagcatgtccagcgaaggcggcggatccagtaatacaatatatgcaccatcgaggtcaaacgcctttgcttgatctttagaactgatgacgtgcacttctcggcgaaggtcttcagtttgaagtaatgttgttgagtcttctttgaaagagacaatggcccgtttagcagatggaagggcggaaactgtgtcttcccacgtccgttttccccttaaatcaaacagctgccattcagaaacagcggcatcctttatcataagctgcggcttttttcgattgttccattcgttgattgacatctcaccgacaatagaaattcttgaacccggtacgatgccttcttcaagctcgcctttattaaaaccgacgcaatcaagctgggacgactcgtttctgatcgtcattttgacatgagttttatttgcccctatcttgcggacatcttccagtactgcgttttctacgagaacgtgcggtttcgggttcagcatgccaaaaggagacagcatgttcatttctgcgatgctttcaactgtaatgtcttcgacgccgcagacaaggtcgacttcctgtacgggaataaaatcctcttccgtaagcgtattgtccgctatttcattcagcctgcttcgcaaatccggcacatcttcggctttcagcgtcatccccgcagccattggatggccgccgaaatgaggaagaatatctctgcattcagaaaggctctcaaataaattaaatcctctgatgcttcgggccgaacctttagcgattcccttttcttcatcaataccaagaacaatggccggtcggtagaaacggtccacaagctttgaagccacaatcccgacgactcccgggttccatccggctttggccacgacaattgcagtttgatcgagcccttgctgttcaaccatgtcaatcgcttcatccgtcattttgctgaccattttttggcgctctttgttcagctggtcaatttctgcggcaagctcttccgcttcaaacgaatcctctgacataagcaaatgaacagcgggatccgcctgttcgattcttccgacggcattcagccttggtgcgagctgaaatccgactgtttcttcgttcgcttctccgatgtctccgcctgacagcttaatcagctcttttaagccgagccgatttgtccgtcgaagcctttcaagtcctagtgttgctattaatctgttttcgtcatgcagcgggactagatcggcaatggtgccgatagccgccaggtcaagcagttcatcaggaagttcacccaataaagcgtgggcaagcttaaacgcgactccaaccccggcaagctctttaaacgggtaagtgcagccaggctgcttcgggtggacgatcgcacggacatccggaagctccggtcccggttcatgatgatcggtaatgatgacatccagtccgagttcctttgccaccttcgcttcatgcacagcggcaattcctgtatcaaccgtaatgatcaaagagaagccccgttctttaattgaacgaaacgcctgttcattaggtccatatccttctttaaaacggtcaggtatataaaaatcaacttgagccgacagtttttgcagcgtgtgaagcatcactgacgtacttgtaaccccatcggcgtcataatcgccatatatcataatcttttcttgttgtgaaatcgcctgttttattcgatctgccgcttctttcatgcctttcatttcaaaaggatcataaaaatcggcatcctttgtatgtaaaaacagcctagcgctttctgccgtatcaaagcctctttttacaagcagggacgcaacaagaggtgttatatgcaattgttctgtgagtgatttgaccttatcctgatctggtcgctggatttcccatcgcatttttgacgctaacataaattcacccctcaaccaccctattatactagagcaggctgaggggtttcaaataatattcgaaaactagtcttttttctcaatcatggctgatgcatcctgtgtgtcagtctgatcagcaagatgagtatcctcttgtttatgtattgctgttctattttctttccgcaaggtttttatttcccgcttcaatttcattacctgaaaaatgccgacagaaaatacgatcagtgctcccattaaaactgagcccaaaataacaagaatgagcggccattctgatcttccaaacaggtaatcaacttctacggatcgaacattaatgactgcgaaaatagcgacaattaaggtgaaaataagtgcgaaaataatggtccattgtttattcattctcttttcccccaaacttcttattgaggtaactttccccatcaagactggttttaaacatggcttaacactaggttaagctccctttgctgttaatttttcccggatcagcctcttcagtccggttccctcaccggaaatcacaagtgtatcgccttcgtcaatgactgtttcagagctcggattcagttgtttatcctgattctttttaacaattgcaatgaccgtcacatgatattcctgacccacattcaaatcaccaatcgtctgatgaatggcaggcgctcccgcctctgctttacaccactctataatcaaatcatcaagggctgactcgacctgttctaatgctttcggtttatatgccattccgccaagaattgcagacatttgccttgcttcagcgtcatcaaactgcacggaggcaacacattcctcatggtcgttttcgtcaaaatagtaaagctctctccgtccgtcatgatgaatgataattgaaattttatcacggtttctagtaatcatttcaactttttgtcctatgcccggcagctctgattcgcgaaccctcatatataaaccctcctacatatctgaaaaccagccataaacacttttaacaccatatatatgtttaaatgtaagcgtatgtcattatagcaaatgtctattttaagttcaatgaaacttcaaaaaacaggctgccctgcagaggacagcctgatattttttattgcgccgaatcttttttcagttctcttcctttccatgcaagccaaatttgtgcggcaatgtatagagaagaataaacgcctgttaacagcccgaccaataaagcaattgagaagttagtaatagaagatgctccaaagatcagcaatgtcacaacaacaatcacaacggttaatacagtgttaattgaacgtgtaaaggtttgctgcaggctcaggtttactatatggttcagatcggcaaatgttttcggcttacgctttttcatatgctcgcggaccctgtcaaatgtaacgattgtatcgttaatggaatacccgattatcgtcaagatggccgcgatgaacgtaacatctacttcaagccttgtaatactgaagaatgtgacgataaagaatgcgtcatatagcaatgaagcaatggcagcaatcgccattttgtattcgaatcggattgaaacgtaaataatgatgccaatagaagctatagcaactgcgtacagcgcatttcttgccagctccttaccgactgtcggtgaaactgtgctgacatttggctcagacccgtatttgtctttaaaatacgtttttacttttgctatggtttctttatctggcaccccgacaaaacgggcaacaccgatattgctcttttcgcctgacagaactacagtatcagggtccatacccagagattcaaaatccttctcaacttgctctgtcgtcagcttatggtcgctttgtacttcaatccgtgcaccgcttgcaaagtcaatgccaagattcagcctgaacacaagcaggataataatcccggcaaccgtgaccgcactggagaaaataaagaagtatttgcgtttgctcgtgaaatcccatttttggaatggcgtatgcggctctgtattttcatccgtatcctgaatatccatgatatgtttcttattgacaccaaaccagccttttttccgatcaagccatctgctttccacaaggagagcgaggagaaatctcgataagaaaacggcagtgataaagcttgtcaaaatcgataggatcagcattgtcgcaaaccctttaacagagcttgtcccaaagataaagagcacaaccgctgcaataatggttgtaatattcgcgtcaaaaatcgtcgcaaatgaccgtctgtttcctgaacggaaggcagagcggactgactttcctagcttgagctcttctttaatccgctcataggtaataatgttggcgtcaacagccatcccgacacctaaaatgagagcggcaattcccggaagcgtgagtacggcattcatccagtcaaagatctggagtgtaatgtagatataaacagacagcgtaatcaccgcgattaatcccggcagacggtaatagaaaagcataaataagaaaataattgcgataccgacaataccggcaaacaccgtatcatggagagcctgctggccgaattgtgcgcctactgatgtcgaatatttttcagtcagtttcacaggaagtgcgcctgcatttaaaatgctggctaaatcttttgcttcttgaaccgtaaattgcccttcaattgtaacatcagttgtgtttaattcctggcttacatttggggcggatacatatttagggtgctctttttgaacctcttttttaaaggagtcccctttttcgtaatccatccaaataacaagctggttgtttggcgccattttcatgacctttttggtcacttcgccgaatttatcagcatctttcagtttaatgctgacaatcggttcatttgttttggcgtcatacgtttgtttagctccgttttcgacgaggtcagagccattcagcaattctttgtcattcgtatctctgaaagaaagctgcgcttcagtcgccaaaatttcacgcgctctgttttggtttgtcacaccagcgagctgaacgcgaatccggttattcccttcaatttggatgttcggttcgctgacaccgagaacattggcccggcggttcaatgcctctactgtgctgaccagaacgtcttttgtgattttgtcacctttttttacaggctgtacatcatacagcacctcaaatccgccttgcaaatccaatcctaacgtaatattgttagcggcaggcttcgtaaagtagcccaagcccgtgccaatcaatagaacgaaaaggaaaaacgcaatcaagcgtccttttttcattatgtatatcctcccttaaacctgtgcgaatcaacctgctatctcagcagttcttccaatgcttcctggccctcttcactgcccagccaattagacgttttaaatgactcaacggttgcatagttcataaattcgccaattttcactgataaaatatcactcgccagttcataaatgttcagttccgttttctttttccacttcttatctgttaagtatgaccacaaactttcgagttcaacatcatcatacccgagaatcttaaactcttccagtttgctgtaaagaaacggcctgacgtggtctttatatagatcggctggatgcttctccacgaattccacgctccttttttattgtttttcaagaagacttgtcatgcttggacgatatatacgcatatctttattgtatatgattccaggtagtttgagaaggcagggggtaaaaatggcgaaacagacgtttttaaagggcactcttatccttatcgcagcaggaatggttacaagaatgctcgggtttgtcaaccgggtggttatcgcccgttttatcggtgaagaaggagtcgggctttacatgatggcggcgcctaccttcttcttggccactacattaactcaattcggtctgccggtcgcgatcagcaagctagtcgctgaagccagtgcgcgcggagatcatcaaaaaacgaaaaatattttagtcatgtctctgaccatcacgggagtgctcagcctcatctttacaccgctgtttctgtttttcgccccggttatggctgaaacgatgctgacagataagcgaacactgtatccgctcttggccattacgccggttgtgccgattattgctatatcgagtgtgctgaggggatactttcaaggaaaacagaatatgaacccgcttgctatgtcacaagtccttgaacaggttgtccgcatttcactcgtggctgtctgcacaacgatttttctcccttacggaattgaatatgctgcagcgggggcaatgctatcctcagtggcaggggagctggcatcacttctttatttattcgtttgctttaagtataaaaagacaattaaaatcagaaagcattttttccagtcaattaaaaacggaaaacaaacctttacccaattaatgagcgtgtcccttccaacaaccgggagccgctttatcggaaacctctcttggtttttcgagccaatcgtcgtcgctcaaagccttgccatcgccggtgtggcaacagttgccgcaacaaagcaatacggggaactgaccggctttgccatgacgttgctgactctgcctagctttattacatattctttgtcgaccgcgcttgttcctgcgatcagtgaaggaatggagcagaaaaaattgcaggtggtggaataccgcttggaacaggcgatgcgtctctgtctgctcagcggaggcatttcagttgttattttatttgtatttgcggatgagctgatgagagtgatgtacggttcttcaggcgcagctgtatttataaaagtgatggccccgttttttctgctttattattttcaaggcccgcttcaagctgttctgcaggcgcttaatttggcaggagctgcgatgatgaacagcttaatcggagcgctagtcaaaacaggccttatttttgtccttgccacaaggccttctcttggcattatgggcgcggcattagccattgtgacaggcatggtgctcgtcacgctattgcacgcagcaaccgtaagcaaagtgctgccgatcagcatcaaaatcaaggagtacgcgctcagcttcgctgttattgtaatttgcggattcatcagctccgccatcaaacattatataagctttggagcatctgaggctgtcaatctagccggatggattgcggtgagcgccgccatttatatgatcctcctgctcgttttccgtttaattaaaaaagatgagcttcgccgcattcccattatcggacgtctgatcatccgataatagtcacgtgcggtacccatctttttcgtcaataaataattctccgtctgtaaacgagcaaaatgaaatatctgaagggtttgtgtatccgtgtttttgcaaactttcaagcagccattttctatctttactgattctggacaggttttctgtttgaatgaagccgtctataatgagcggcatttcgagctgccgatgctctccgctattttctttctttacaatagtcagtttgcccgacggctctaaaatggcaaatgatacgtcagctactctgtcgacgctattttctctgagttgaaccattaaatcatcaaaattatatcgctgtgatttcatggcttcttcgtcaatttttccatatttgataattatagtcggcttaccgtcaagaagctggcggacttttcggttttttaaagaaaagtatgccaaagtcacttgaatgatcattaatacaagcattggcaaaatggtatgaaatagatgatcgtctacgttttctatggctaaaacggcaatttcagccatcatgataaagacaacgagatctaaaatactaagctctccgatctcccgtttgcccatgaaacgaaaaatgaccaatatcacaaaatacaatacgactgtgcgaaacgcaatagtgagaagctcttccatcatgcacctccaactcattataggttgcaacaaaatgatcaatttatgtaagaaaaaccgattgcatttcacaaagcttttacgtctaattcaagggataagggaatacatttttacaaagacgagccatcagcatgtctgacggctttgtgcaaaaagaacagaagccttttaatacaggcagagaggagacaatcatggaggaaacgaaacaagttggaaaaggcattctttacggcttaatcgccatattttcagccatgctcctgacaagtttggcggtttcacttttattgaccgcaacctcgctggaagaatcatcatttaactggctgatcacagctatctcatttctctctttatttatcggcgggttcatttcaggcgggaaaggcaaggaaagaggctggatgattggcgcattgaccgccttaagtttttctctgattatcttattgtttcagtatttaggattcggaaagacatttacagcagaacagctgatcttccatctgggatttttaggggtgtgcatgctgggcgggattttcggcgtgaacatgaggggaaacaggtcttccacataaaaaagagcgggctcacttgcccgctcttttttgtttgctatgtatagctcctgctgttattcagcagcagaaacttctctgatcgcgcggcggtcgaacgtaagacgtgtgttatcaccagtcttaattacgactttgctttcgtcgatagagtcaacagtaccgtgcaatcccccgattgtcactactgaatcgccttttttcagttcctcttgcatttggcgtacagccttttgctgcttttgctgaggacgaatcagcaagaagtaaaggaccgcaaacattaaaataataggaaccaatgtacctaaagtgccagtcatcattttcacccctttctgtaagcctgttatgtttatttagaagcttttcgcatttggcttgttatagccgtaacgctcaaagaactcttctctgaaatcacccagacgatcctcgcgaatagcctgtcttacctgctccattaagtgtaacagaaaatgaaggttatggtaagttgttaatcgaaggccgaatgtttcattacagcgaatcaagtgcctaatgtacgcgcgagtgtagtttttacatgtatagcaatcacactcttcatcaatcggacggaagtctctttcaaatttcgcatttttcatattgagtcgtccttcagcagtaaacactgtgccgtttcttgcaatccgtgtaggcagcacacagtcaaacatatcgaccccgcggatcgctccgtcgatcagtgcatccggagaacctactcccatcagatatctcggtttatccttcggcaagagcggtgttgtaaattcgagtacacggttcatgacatccttcggttcacctacagacaatccgcctatagcatatcccggaaaatcaagcgaaatcaagtccttcgcactttgtgtccgcagatcttcatattctccgccttgtacaataccaaacagcccttgttcatcctgacgattgtgggcattcaggcagcgttccgcccagcggcttgtccgctcaactgacctcttcatgtagtcgtactccgccgggtatggcgggcattcatcaaacgccatcataatatcagagccgagtgcgttttggatctccatcgctttttccggagataaaaacagcttgtctccatttagatgattgcggaaatggacaccctcttcctctatattacgaaacttgcttaaagaaaagacctgaaaaccgcctgaatcggttaaaattgcgcggtcccagttcataaatttatggagcccgcccgcttctttgacaatgtcttggcccggacgaagccatagatgataagtattgctcaaaatgatgcctgcatccattgctttcagctcttcaggcgacattgttttgactgtcgccagtgtgccgaccggcataaaaaccggcgtttcaaaggagccgtgaggcgtatgcactttgcccagccgcgctcctgtttgtttgcattcttttataaattcatagcgtattggttgttcagccacttttgatgaggcctcctgttctcaaattatataatcagcatcgcgtctccgaagctgaagaaacggtattcctcttccactgcatggttataggcacgcagaatgttttctcttccagcaagcgcgctgaccagcataatcaatgacgatttcggcaaatggaagtttgtaatcattccgtcaatggctttaaattcatagcccggataaataaaaatagatgtccagccgcttgatgctttaaattgcccgtcatgttccccggcaatcgtctcaagcgtgcgtgtcgaggtcgtgccgacagaaatgatccgaccgccattttctcttactttgtttaaggctgcagccgtttcttctgacatttgataaaactctgcatgcatattatgctcttccacttcatcggcactcacagggcgaaacgttccaaggcctacgtgcagtgtgatgaactcaatttgcacgcctttgtctttcagctgctgtaagatttcttccgtgaagtgaaggccagctgtaggcgcagcagcagagccgatttcttttgaatacactgtctggtagcgctctttgtcatcaagctgttctttgatatatggagggagcggcatctctccaagggattcaagcacctcgtagaaaataccgtcatattgaaattccatctttctgccgccgtgctcaagctcttccgtgcagattgccttcaatcttccgtctccaaatgtgacaacagttccttttttcacccgtttcgccggtttggcaagtgtttcccatttatcaccggtttcctgtttcaacaaaagaagttccactttcgcgccggtatcctcttttgtgccgaataaccgcgcaggcagtacccgggtattgttcaggactagacaatcgccttcgttaaagaagctgataatgtgtttaaacgagctgtcagtaagctctcctgtatgtttatcgagcaccatcagccttgaagcatcacgctgctccaacggtacttgtgcaattaaacgttctggtagttcaaaatcaaataaatcgactttcatgatgatttcacctttattctagtcttttgttatttcattctgccaaaaagattaagcaaaattgataataccacacttataataatacaagtgacaaccgggaagaaaaacgtgacatttcctttttttacaaaaatatctcccggcatcttgccgacaaaatgcaaaactgctccgataataagcaaaacagcaccaagaatcataatgatcttaggaaattcagtcatatcggggagcctccatttggaaatgatgataaacggccggtgtcacgatccttccacgcggcgttctttgtataaatccaatttgcagcagatatggttcatatacgtcttcaatcgtatgcgattcctcgccgatggtagctgaaatcgtatcaaggcctactgggccgccgttgaatttttcgatcatgcccatcagcagcttatgatcaatatgatccaaaccgaggcggtcaacctgaagccgctccagcgcattctgagaaatgtcttccgtaatcctgctgtcacccagcacttgggcgaaatcgcgcacccttctcagcaggcggttcgccacgcggggcgtccctctcgatcttcttgcaatttcaagagccgacggtttatcaatctcaacctcgaatacatcagcggttcttgtgacaatatccgccagttcttcttgtgtatagtactcaaggcgagacatgacgccgaatctgtctcttaaaggagccgtcaaaagccccaccctcgtcgtggctcccaccagcgtaaaaggcggaaggtcgaggcgaaccgagcgggcagatgggcctttgccaatcacaatgtccaggcaaaagtcttccattgcaggataaagcacctcttcgatcgatctgtgcagcctatgtatttcatcaataaataatacatctcccggttccagcgccgttaatatagcagccaaatcaccaggcctttcaatcgcaggccctgatgtcgtccgcaattccactcccatttcattagcaacaatcgaagcaagcgttgtttttccgagtccgggcggcccgtacagaagaacatgatccagcgtctcctgtctcattttcgccgcatctataaacacgcgcaaattttcttttaccttatgctgcccgatatactgtgccagattttgcggcctcaggctttgctctatcactgattcatggttgtctgcttcacttgagacgagccgttcatccatgaacatcaccttactttaatagtttttgtaatgcttttttcacatattggtctgttgtcagcccaatttcttctttaaggtgaggaagcacctttttgatttctttttcagcatatccgagaaccctgagggcttcaagtgcttcttcaagagccgtttccgctgtttgcttttcaagcctttcttcatgattaaacagattttcaatcatttcaggcacaacatctgccagctttccttttaaatctagaataatctggcgtgcggttttttttcctactccaggaaacttgaccaaaaaagcttcatcttcattttcaattgcttgaatgaccgctccgggatcacccgagcccaagatggcaagtgctcctttcgggccaattccggtcacgtttaacagctttgtaaagagcgccttctcctctcttgttgaaaaaccgtaaagcgaaaaagcatcctctctgatatgatggtatgtaaaaatcgtttcctggcttctctccttatatataaagggattcggcgtgaaaatctgatagccgatgccgccgttctctatgacaatatattggggagatacataatcaatcgtccctttaacaaattcaatcacgcaaattcacctctttgactgttcttcattgtaccataaaaacagccaaagtcttatagaaaagttaacatacgttcgcttctctctcattctttcacgaaaaaaaagacatgaattcatgtcttcaatcagcggacgttacccgctgtatgtcttcatatgttcgatgacatcctcaaactccgcttttgtccgaaatggaatgcctttcagcagatttttttgcatatggctttccagcctttctaaatcaatttgaaaaaaagactgaattggttcggaagctggctcaggccgcccatgaaaagtggaaatcactccattatccgatacaccgatatacccgttgaccttgctgagcggagaaatatcgtccatttgcttccggaagagcacatatccctttttttgttccacaagcgtccatccggcataagctgcccaaaaatcatccatagaaaacactttttcatgcttatgctcaatgctgacatcgccgtccaaatacaccttttcaagctgcacatgcacctgcagcggctcatagtgctccacttccgcgccaagtgcgcgggaaggagctcctattaaaaatactgccgctgagcaaagaatgcccagcaaaagatacgccgtgctgaatcgtttcaccctctacacctctttgcacacgtttatgattagtttgaccaaagaggctactgcttaaccgttttatcaaaatttgtctgcacattttccctgacaaaccgttcctccgtatacacatctgtgctttgctcagaaattgtcaagaatcgcgtcagaaaggcactgaaaaaatacaatgccgcaaagatccaaatcacgccgcctgcaccgagcggcccaatgaaaagactcacgatgcccggcgcgataaacgcacataaaccagatcccaaattcaacactgacatggcagcacctttattatcaggtgcaagcgtcggcaaaagcgcgcttaatgggacgtaccctgctaaagccgcgccgtagcagcaggcgataatcatgagcacccaatactgatgcccgatcagctgaggcgtgtaatacagcgccagcgtaaaaataccgcatccgacaccgccaaaccacatgaccgtattgcgccagccaagtttatctccgactgcaccgaaaatgatattaaacacaatattcacaaaaaacagcgtcccccatatttgcagccattccgaaaccgaatacccgtatcgtgctaaataagtaggaagaaagatggcaaatccaaattgtcctatcgcattaatcgtcttgaccactccgccgatgcctaccttagggttttcaaacataattgtaaatgccttcgacaattctttccatttcggctgatcttgtttttgtatcggagtaaatttatctttgttaaaaaataaggcaagaattccgcctgccgccacaaacagtaaagcgctccaaagcgtattgatttctccaaaggccggaactgcatagctggaatagaacgggcccagcacgttaaggccgcacgtaaacataaaccaaaaccagccgacggctttgccgagaatattttgagaggtgctgtatgacacccatacgagaaaagagtatgcaaacagcggatatcccaagcctctaagagcatagctgcccaagagagccggataatacatatgaggaatcgcccagccgataaaagcggccgaaccgaggataaatgcaagcaatccgacagtcatcgtttttctcggcccccaagtttggacaaacgttcctgaaagccaagctgagatggtgacagcaatgccgtacatggtaaataacgatgcggattgctgcatactgagaccatgatcaacgagaaaaggagacagccagccttgttcgaggccgtctccaaccataaagatgacaacgccaatataaccccaaaccatgtgagaaggaattccgattttgttcaaaacatttcctttagcatgtactgtattcattttctccaccgcctacttaaagtatcaatggagtatatacccaagcttgctgaattgtaatcctgttagattaaaaagcgattttttcagtgtgctcaatgctgacaggcatgccaaaagcaagcgattgctgtgctgctctggcgatccttccggcctgtaaaccgtcattgccggtgcagggagtctcctggtttgtgccgatcgcttctgcaaaacggagaatctcctcctcatatgaatccttatagcgttcaaggaaaaagaaatgcggtttatccttcatcacaaaatcagctgttgacacctcaaccgttgtcggcctgctattatcagccgctgcagagcctttcgtcccgaaaacctcaacccgctggtcatatccgtacacagcttggcggctgttatcaatcacagccatggcaccgttttcaaaagtcagtgtaataacagctgtatcaatatcacccagctccgcaaaagaaggattcaccaaagctgcccctttggcatacacttccgtcacttcgcttcccataatatatctggccatatcaaaatcatggatcgacatatccataaacaatccgcctgacgtacggacataatctatattcggggttctgggtcccgggacgtgatttttaataaatgaggtgtaccgatttcaccattttcaacaatcgttttgattttcttaaaatgaggatcaaagcggcggttaaatccgacttgaagtgttacaccgtgtttccggacagccgcaagcgcttcactcgtttcgtccagagagaaactaacgggcttctcacaaaatatatgctttttcgcctcggctgcttctttgatcatctgtgcatgtacggctgtaggagagcaaataaaaatagcatcaatatcaggatcatgtaataaatcacgataatcagaggttatgtattcaatctgatgactgtcggcccagctttttatacggcttgcctgaatgtcagagactgcttttattttcatgtgaggaatccggcttatattttgaacatgaagtttgccgatgcggcctgcaccgataatccctgtcacaatctgttttgtcatggcttcttcccccttgatcattcacgaaagcgctttatttaaaattaatactatcccatttgtaagcgcttttcaagaatggaaattaaacgttctatgtctcttttatcacaattcatgcttataagtagccttcttcttcaagaccagatacactagaattaggctctttttcctgaacagtttatgattttcctataaacagctgcataaaatagagcaaagaaggtgaatgaaatgctgacaaaagcagaggcactggcccataccgtcatataccgcaagaacagcagatttgataaagtcaaagagaaatccgaggaattaacactaatcggcaagggaagaagcgcctatgtgtttgccttaacagaaggcggtcgaaaaatggcgctgaaagtattttttccggaatatcaagcgacagcagtcaaagaagcagcgatctatgaaaaattagccgggtccgcattctatcctgacatttacgaaactggcgattcatttattctcatggaatatattaaaggtgaaaccttttataactgtctgaagaaaggcattgcaatcagtgatgacatgattcagcaggttgaagaagcgctttctgacgcccgggcagccggactgaacccgtcagatattcatttgcggaatctgatattgacagaaaccggggcggtgcgggtgattgatgttgcgagatttgagcagacaaaaacatgcacgcagtgggacgacttaaaatccgcatatcatgcactctacaaaaaaccgatattccccaaaaagattccgggtttttggctggagatcatcgcatttttatataagaaagattggtttcaaaagcatttcgcacagcggaaaagaaaatattcttaaatcaaaaaggcagccgcacaagcggctgcctttatcatgtattttttactttctgacggcagaaatcagtttcatttgttcaggcgacagcttaattcgatagcctctcacagttaagtagaccgcttctgggtccttctcaccggaatgacaatacgttttttccatttctgtctcccctcaccctttattggctttatttcatcttatcattgctttattaaggtagttttaaagaaatgtaaagatcatatgaatccgatatatagtaaaatgagagaaaaaaagggagagagtcacattaagacacgcagcaacatcccgcttattatgtttgccctgctggtcttcttcggcggcgccatctattggatgttattttcactaaaaaacgttccgaaaggcaatctcgtccaatcggttgattcgccggacggcagctatacgttaaacacttatgtatccgaaaacatcttgagcttagatgcagccagaggtgaacttgtaaatgaaaaaacacttgtcaagagaacaatctactggaattacccggacagccgcccagcagtgacgtggatcaatcacaatacagtgaaaatcggcaatcagactttacatcttgatactgatgaaacgtatgattggcgaaaagatgatcattggatccgtgaaaaaccgccgcaggcgtcagtgaggtgatgaaacatgaataagatgaacggaacaaatgatgacaagcatttcaatcattttgtgattgctttatcctttatatacggtttgactgaactaggctatttgttgctgaaggattttataacaattgccataagtttgcctctgtagaaaaacgcagcgtagtcgatacgccgcgttttttctttttcccttcctcttcttattgttaattacaggtcatataatgtgacaaatcgattgtagaaatagttcgattagaccaaaatcctttttatacatgtattcgaatttgaagtgagggggaagcttgatggcagattttgttgctagtttgaatgcggtcttatggagtacgcccgtcatttatattttattgggaattggattcaccttttcaattatgacccgttttttacaagtccgacatttaaaagaaatgattgttcagatgttcaaaggcaagagctctgaagccggcgtttcatctttccaagcgttatcgattgcgctgtccggccgtgtgggcacaggaaacatcgcgggagtggcgacagcaattgcattcggcggacccggtgcagtgttctggatgtgggcgattgcctttatcggggcggcgagtgcctttgtagaatcaacgcttgctcaaatttacaaagtgaaacaagacggtcaatatcggggcggccctgcttattatatagaaaaaggcttaggcattaagtggtttgccgtcttatttgccgctgctgcccttattgcaatggcctttctaatgccgggcgtacagtccaactccattgcggctgggatccaaaatgcattcggcatctctcctttcgtcacagggtgtggtctggttttattattagggttcattatttttggcggcgtcaaacgaattgccaatgcggcgcaaatgattgttccatttatggccattggatatatcctgctgtctttgattattattgtcatgaatgtgtctgaattgcctgctgtgatctcattaatattcaaaagcgcctttgcattggattccgcttttggcggcttgatcggcatggcgatttcctggggcgttaaacgtggcatttattcaaacgaagccggccagggaacaggcccgcatccggcagctgctgcagaggtttctcatccggtcaagcagggactggttcaggcattttctgtttatattgacaccttgtttgtatgttccgctacagctttcatgatcttgtttaccggcatgtacaatacccaggctgcagatggttcctttatcgttcaccagcttaaaggcgtagaagcaggacctggtttcacacaagcggcaattgacagtgttcttcccggattcggtgcaggctttgttgccatcgctttattcttcttcgcttttacaacaattatggcgtactactacatcgcagaaacaaatatcgcctatttagcacgaggcagagaaagcaaatgggcgatgcttggcttaaaactgattattttagccgccacgttctatggtactgtgaaaacagcttcacttgcttgggcattaggggatgcagggcttggcattatggtatggctgaacgtcattgccattgtgctgcttgccaagccggcgctccttgctttaaaggattatgagcgccaaaagaagcagggcttagacccgatctttgatccaaaagcgctgggtatcaaaaacgctgatttctgggagaaagaatacactcatgaaagtgaacgtgtctcctgaacatactaaaaccggcccgatatgacctcgtgccggttttttatgaacgatagtttgtatacacttcttgaacatcatcgtcatcttcaaggacgtctattaatgtttccagcttctcaacagcctgatcatcggcttctgcataggtattgggaagcatggtcacctccgccgaagaaattggatatttcgattcgagggctgttttcacctcttcaaaatgctcaggctctgtgaaaacctcatataggttttcttcaattcgcagctcttctcctcctgcttcaagcacatcaagcatgagctcatcttcttctatttgccattcagtacggtctatcgtaatgaacccctttcgttcaaataaaaaggctacacatccgctttctcccagacttccgccatttttattaaaggctgtccgcacatttgacgccgttcggtttttattatctgttacgcattcaaccatgacggcaatccctgaagggccgtagccttcataggtgatttcttcatagctgcttccgtcttggcctcccgcagcttttttaatggcccgatctatattttcattcggcatattggcgccttttgctttttcgatgacaagacgcaatgctgaatttgcttctggatccgctccgccttctttcgctgccacatagatttcttttgccagcttcataaatattttcccgcgctttgcatcctgtgcattttttcttttttgaatgtttttccacttggaatggcctgccatgttttcaccttcttttacattttctatgtacactttaatgggaattgttcgctgatgcaaagaaaaaggctgccgaatatccttccggcagcccttccttcctagcggttgttcattttatgaagttttctgaacagccctttatctgttgatacttggacgtcacggccatttgcatagttgcgcgctgcttttacgacattatctctgtcagactttgtgaactctctgtggcttttgactgcgataactactcggtcatcggataccataacttgtgtgtcattgacgtttttcacttgtttcacacggttggcaatttttgcagccagtcttctgttttcttggttgtcatacccgttgttcgctgcattccgattcatgtttcggttattcgtgttgttatatgttccgtcagttgccaaaggaacacgatcgtcagcagtaacacggtcacggttatttacattcgtggtgtttcggttaccgtcgttctgatcctccattaattcagaaacaggaccatcgtggtcgattccgtctccctgtctatcggcgtcattttcatttgtataatatccgattggacgggtattgccgttattgcgcgtatcattcatagcattatcgtttgctccgcatgctgttaagccggctgtcattagaatcaggctagcgatcgtcatttttttacccaatggaaaaaccccccgtggacgaattgagcatgtttgctcgcttttatcatgtgcgtatggggggcatgttaagcgtgtcagttctctccatttggcagtgatcagcttgaaaataaaaaaaggaacgatttacatcgttccgaacaatcactcattttcttcttccggccggccaaacatttggtttacagaaggctggttcgtcattggcatagaaactcctgccgaatatgggtttggatttgggttagctgtgccatatggcatattagggcttccataagctcccattcccgaatggccaggcgcagagaaatatggctgatgatcaccgtcacagccgcagtcgtcatgatctttgtatggcatgtaaccatgagccgcagcaggctggtatgctcccattacttggggagtgccgtaataagggccatacggcatatgtccatacggagatccataagccggagatgcgtattgcggcgcaccgtatgaaccgtaatgtccgtgatggctgttttcatgatgctggttttcataacccgggtcatactgaggcgatacaaatcctggctggtatccatgcatcggatgcattggataagcttgtgccggatagtacggatagcataatcctgatcctggaagaattggcgaaacaggcaccggacacggtacgaaatgagccggataatgataataaggctgaacagccggcatcggcatattcggaactgtgtgatgaacgttttcctcttctacaccgcctacctctggcgcctttggcatattaggcatattcggataattagcattttccatattactcatagcctcctgttgtggaaattggtcttgcatatgatacatatgatccatatttccgtcatgatgtttttttggctcctccggtttaggaggcgaccaaggctggaaaagctgtttcatatcataataatcgttcacatcagcttcagggtacacattttcctgcaaattaggcatcggcgggacatacggcatggacttcttttctttcggctttgtgtcttctacatcgacaacggatttaggcttctctttcgcatatggatgttcttgcttcacactcccggccgcaggacttttgcccgcttttggctcttttctgaccgggactccttctgacggcacttttattttcattccaggcatgattaagtctggattgctaagctgtgtattgagttttttcacttcctcaacatcgactccgtacttttcagctattttccagagcgaatcgcctttttgaacgatatggattttcaacgttttcccctcctatgcaaaacgtgaacagttcagctgtgattacaatatgtttcttcacaacatatgcctgaacaaaagaagttatgagtaaaggaagggaaaatatttctgatctacgtgatcgaaagcattcgattcagggcaaggagtgcatcttcctgaatggcttttggcaccttgatgacgcctgaaggttctcctttttcaatttgttccagcgaccacaacaaatgcggcaaatcaattcggttcattgtcaggcaagggcacatgtcagggttgagtgattcgatttgtttatctggatgctcgtgaatgatccgcagaacaagattcatttctgtcccgattgcccacttgcttcccgccggagcctggttgattgtgtcgataatatatttcgttgatccgttatcatcgcttagtgtcacgacttcgtgtgaacattccgggtgcacaatgatctgaatgtcggggtctcgctctctcatatcatggatatttttagtggtgaatttctcgtgaacagagcaatgccctttccacaaaatcactttcacattcgtatgcccggattcagctactaattcatctttcatcggatcccacacagccatatcttcaagcgcaatgcccagatcataagccgtatttctccctaaatgctgatcaggcaaaaataaaattctttttttctgtgtaaacgcccattcaagcacttttttcgcattcgaagaagttacagttgctccgccatgctttccgacgaatgccttgatctccgcagtggagttcacataagttaaaggtatgatcgtatctccaaatatatgctgaagcttcttccatgccctattggtctgctgcatgtcagccatgtcagccatagaacatccagctctcatatctggcaggacgaccgtttgctgctcgcttgtcagcatatcggcggtttctgccataaagtgaacgccgcaaaatacgatataatccgcttctttgtttttttccgctacttgggccaattgcagggagtcgcctgtttggtcagcaaattgtatcacttcatccttttgataatgatggcctggtataaagagcctgctgccgaactttttcttaatggcggcaacgcgcgtttccatatcctttctcgatagttctttataactttcgggcatcatatcattcgattgtttgatcacatcaagaattgacataacggcattcctccacagattcatttgataacgtaacatccatgctgatatctaaacttttgacggaatgagtcagaaatcctaatgaaatataattcacacccgtccctttaaaagcaggcaaagattctaacgtaatcccgccagaggcttcagtttttatatgagccggtgtgagctttgcaaaatgacggaccgtatcaggcggacagttgtcaaacataataacatccgctccagctgcaattgcttcccgcagctgtccctccgtttcaatttccacctcgatatttaccatgtgccctgcggcctgacgggcttttttgcacgcctctaaaatagagccgcatgctgcgatatgattatctttaatcatgatgccgtcatacaaaccgaatcgatgattatacccgccgccggctctgacagcatatttctccagcattctgagccccggtgttgtttttctcgtgtcacaaattttaatctgttcatcatccagacaccgaacagcctctcttgtcattgtcgcaattcctgacagtctctgaataagatttaatacgacccgctctcctgaaaggagcgcagctgcgggaccgtgtaactcggcaatcacttcacctttatgcaacatgtccccatcttttttgtttaaaatgatttgaacattttcgtccaataacgaaaagccttcttttatgatcgctgctcctgcaaaaataccctctgactttgcaacaatctccgcttcacagctctgttctccaaaaatagactgcgatgtaagatcccctgtcccaatatcctcaagaaaaaagtgattcagtaattttttcagctgtaaatgattcattgttccaaatcccctcgttttttctgatcttcgttcctttttttgtatggacaatttgtcttccttgccagcccacctcagtatgaggaaaatcggttcggaagtgagcccctctgctttcctcccgcaaaagcgcagaaaacgtcatcagctttgcagtttgccatagatgagaaagttccatctgccgaattgtgatatccttcacatttacttcctgaaaaggcagcgtatgaagccagatgctaagctcaatcaaactgctttgttcccgcagaatagacatgtggcttgtcattttgctttgcagttcatgcacctctatatccggcacctcgtagaagacactggtttctagccctgattgatattgcctgttataagccggtttttggataatatgctctgctgccctttttccaaataccagcgcttccaataaagaattgcttgcaagccggtttgctccatgtaaaccggagcatgctgtctcgccaatcgcataaagccccggcactgtcgtttctccccagcgattaactgaaacacctcccattaagaaatgcattcccggagcaacaggaatttttccgctgtggatatcaatccctgctttttcacaaatagcggtgatagtagggaaacgcgtttcaaaatcagaaatcgcactgaagtctatataaacgcgatttccttttgccatttcttcgtgaataacccgtgagacaatatctcttggagccaggtcacctaaaggatgccgttcagccataatcctgcggccgttttcgtctactaaacatccgccttcccctctgacagcttctgaaacaagcccgtagaaaacaccatttttcacaagcagtgtcgggtgaaactgagtaaactccaaatccgttaattccgccccggcccggtaagccagagaaagaccgtcacctgtgacagtgagatcattcgtatggtgaagaaacaggtttccacagccgccggcagccagcacaacttcgtctgcgtgccttaccttgagccgccctttgctgtcttttgtcatgacgccgatacatcgtccgtcctctataagcaaatctgctgccatttcattctcgattaacttgattttgctgttgatccgtttgagcaaataatcgataagcagcctgcctgttgcgtctccgcctgcatgaaatatgcggttgtatgagtgggccccttctcttccaagacaaacaccgcctcgttcattgcggtcgaatggaaatccacgctccaataggctttgaaccatcatttttccatcatgtaatacgtctgctgcaatagctagattattatggccgcatcctgcgtataacgtatcctccagatgggcttcaatcgagtcatcttttgcataggccgcagcaatcccgccttgtgcatagacagaattgctgtttttgacgcttttttttgtgataacagtcacttcgtatgagggcgggaaagctgcagctaaggaaagtgccgccgcccctgaaccgatgactgcaatcgtctttttagacatatgccatcctcctgttgtttacacctgtcttgacacctatatttacacaaggataaaataaactcaagagttttttatggagaacggatggaggaagaccggatgatttatttagattatgcagcgacaacgcctatttgtgaggaagcccttactgtatatcagaagcttagtatggatatgtacggaaatgccagcagcctgcatgatgcaggaggaaaagcaaagcacatactggagtactgccgtgaaaaaatcgccaacatcattggcggagaagcaagcggcatctattttacaagcggcggcactgaatccaattttctggccattcaatcattgctaaacggcctgccaaaaacgaaaagacattttattacgactgccatggagcatcagtccattcataattgcgctgcttttttggaacagcagggatatgatgtaacagtcattgaaccgaatgaatacgggcttattaccgaggaaatattactagcccatatccggccggaaacaggccttgtatctattcagcatgcaaattctgaaaccgggatcattcagcccattcaccgcctgtcttcatacctgcacaataagggcattcttcttcattgcgacgctgttcaaacgtttggaaagatcccgatcaatacaaaaaatctgggagtagatgcactctcaatgtccagccataaaatccacggtccaaaaggagtaggggcggtctatatccgtccggatgtcccttggaaacccgtttatcctctgactactcacgaatacggattcagagccggcaccgtaaatgttcccgggatcggtgccttcactgccgctgcagaattgatcgtaagcgaaatggaaaaacagatatcccgcaatgaggcattaagaacttactttctagaccaaatccgtattcggtctctccctgtaacccttgcggcagacacttcgcaagcagaatgtcttccgcatattatagggtgtttttttcactcatttgaaggacaatatgttatgttagaatgtaatcggagtaatatttgcatttcaaccggcagcgcttgttctgcaggttaccacggtccgtctgaaacaatgaaagcattaagaaaaaccgaacaagaagctctgcaatttatccgcatctcttttggcaggcatacaacagctgaacagctggaacagttattacatacgtttacagtgctttgggaacaaaagaaaggagaatttgatattgaccgaagaattaaagctaatgggcgccaacaggcgtgaccagcttcttctgtggctgaaggaatctaaatcaccgctgacaggaggagaactcgcaaaaaaagcgaacgtttcaagacaggttattgtacaggatatatcgctcttgaaagcgaaaaatgtaccgattatcgccacaagccaaggatatgtatacatggatgcagccgctcagcagcaccagcaggcagaaagaatcatagcatgtctgcacggtcctgaacggacagaagaggaactgcagctcatcgtcgacgaaggcgttacagtaaaagacgtaaaaatcgagcatcccgtgtatggagatttaactgcagccatccaagtaggcacccggaaggaagttagccatttcattaaaaaaatcaattctacgaatgctgcctacttatcacagctgaccgacggcgtgcacctgcatacactgacagcacctgatgaacatcgcatcgatcaagcttgccaagccctcgaagaagccggcattttaattaaagactaaaaaaagccctctagagggcttttttataattggtaagactggtatgcacccaggagctttactttgcagccgagcgcttcaagctcctgcatggcccctggaatcaatacatcatcaaacgctttctcaatatcaataataaagaaataatggcctaatccggttttagtcggacgtgactcaatttttgacaagtttaaatttctccaagaaaatgcagacagcactctatgcagcgccccggactgatcatcctgcggcagcatgaccattaaggtcgttttgggcctagaactcaattttgaattcacttcaaaagatatgttttcatcaggagacaggataacaaatcttgtatgattgtccctataatcctgtatatcccgtttcacgatttttaattcgtatgtagaagctgccatatcattggcaatgaccccgatattcagctctggatggtcactgacaaactttgctgccgccccggtagaattggcgtattcatatggaacggaaggaaaatgtcgatggagaaatttatggcattgcgcaatcgcgtgtgaatgcgagtaaattctgtcgagctctttccatgcattctctcttgagggatgaacgagcaagtgctgatgaatcggcaacgtcatttcacccacgattggcaagggctgttcatgtattaaatagtctattgttagattaacagatccttctaaagcattttccaaaggaacaaaagcaaaatcaacttcgcctgcaacggctgcatctatacactccggaatggtgcggtaagcaacatgttcggcgccgttttgaaaacaagaactgactgctagatgtgtaaatgtagctgctggacctaaataaccgactttcatgacgattttctctcccttatgcacctgaacctaatatttcaaccttttctacaaaatcaaacttcctgagcttattcattaatgtatgaatgtcttcttccattgccgacgtactgatagacagtgtcacatttgctctgccttgaagcggaatggtctggtgaatggaaagaacgttgcttccagaatcagctaccgcctgaagaagctgagataacgcacctgacctatcctccaaatgaaagaaaagtgtgataatttgttcttttaccatggtgtagaatggaaaaacagcatccctgtatttataaaacgcacttctgcttaaatcgaccttttgaacggcatctgctactgaatctgctttttttcgatcaagcagctttttgacttctaatgtttttctcattgcatcgggcaatacatcttcacggacaagataaaatgtctcctctttcatttgcatcccccctttaaaatagagagcctggcaccaggctctcttttcagccaacattcattaatcaataaattcaaattcaaattccagaagcctgattatatctccatccttggctccgcgttctctgagtgcttcatcaacacccattccgcgcatctgtcttgcaaaccgtttaaccgattcatcacgtgagaaatcagtcatcttgaataaccgctcaaggctgtctcctgaaagcacaaatacaccgtctggatcgcgtgtaatgttaaatggcacttcttcattttccatcgtgtacatgacacggttttgtgtaagctcttcctcgtcatacagcgggaattccggtgtgttctcaagctgattggcaacctcaaacagaagctcacgcagaccttctcttgtcaccgcactgatcgggaataccggataatcatccgtcagcttttctttaaaggcttcgagattttccgcagcctccggcatgtccattttatttgcaacgataatttgcggacgctcagtgagacgcagattgtactcgctcagctcctggttaatcgtaagataatcctcatacggatcgcggccctctaagcccgacatgtcaatgacgtgaacaataaccctcgtccgttcaatatggcgcaaaaactggtggcccagtccgatgccttggtgtgcgccttcaatcagtcctggcaaatcagccatgacaaagctgcgtccgtcatccgtttcaaccatgccgagattcgggacaagcgttgtaaagtgatagtccgcaattttcggttttgcagatgagacaacagacagcaaagtcgattttcccacactcgggaacccgacaagcccgacatccgcaagcacttttaattcaagaacaatgtagcgttcttttcccggctcgccgttttctgaaagctgaggcgcgggattagccggtgtagcaaagcggctattccctcttccgcctcttccgcctcttgcaatgacagcccgctgtccgtgctctgttaaatcagcgatgacctgttttgtatcatcgtctgtcacaacggtgcccggcggaactttaataaccatatcatcagcatttcgtccgtgctggtttttggacatgccatgctcgccgcgaatcgctttaaagtgttttttgtatctaaaatccatcagggtgcggagaccttcatctacttcaaaaacgacgtctcctcccttacctccgtcaccgccggcagggccgcctttcggcacatatttttcacggcgaaacgcaaccataccgttgccgccgtcgccgccttttacatatactttgacctgatctacaaacataatgtcctccgttctaaaccgttaaaaactccgctagtccaacccaatctcaatcagacattcgtgactcgtgatttcaaaacgcatgatatcaacgtcctcatatccattctgccgaatatcatcaaaagcagatggatcggcaaaggcgccgtgaaaatcaaggtacagaatcagctgtctgtcaggatgatccgtttgaagcgaaaccgttaaatgattttcactctctctgctgactgcttgatcaaacagatgaaacagctttctcatcagtttcgccagcttttgatcataagccgacaaatccttaatttctccgagaacttcatattcaagcgtcatataatgggttttccaattaaacgtaagaaaatcaaacgccaaatgcggtgttttcaggtttgagagctttgattcgtgctttgcgtctataaccatttcttcaatcatttcaaagacgcggtcatacttctgcaagcttaagtttcctttaatcagctgcagcttattcatccaatcatgccgggaatggccaagcagatgaatcagttcgtttgttaatgccgtgtcgcttatattttcttcttgattttttgaaacatccttcattttcgcactcccaatcatttaatttcttatttaggagtctgtataagtgtgtattatgaattataacagagaaggctttgttagaaaaacaattgtttttcccagaaatatcatgttccttttttctggctttggttgatttgcagccaggcagaacattttatgtattactgcttggggaacatatccagtgggtttgagatgtttattctcattcttggcggggtctgctcgcacatactctgcatttcattctaggtgtttactccgcatattgcaaaaaaaactccagtcatcatcgaccggagttttttgaatcattattgagctacaggatatacgctcacttttttgcggtcacggccgaaacgttcgaatttaacagttccgtcgattttcgcaaatagagtgtcatctccgccgcggcccacgttttcacctgggtaaatttttgttccgcgttgacggtaaaggatagaaccgcctgttacgaattgaccgtcagcacgtttagcacctaaacgtttagcctcagagtcacgtccgttctttgtagaacctactccttttttagaagcgaaaaactgaagatctaatctaagcatgtagctcacctcctatattatgtttgtggtcacacgcaagttgtctttgtaatcccgttcgattgtctccagcgaaacaatcatgccttcaatcagcaactgagctttttggcgtgcctctggatcaagagattcagggaattcaaaataaaaataacccccgtcctcccctatatcaagaagcggctcgaagcccgcgagcacaatgaccgcgttaacggctccaaacacaacggctgtcactccggcacaaacaagatcttgtccatgttcagcaaaattcgcatggcccgtcatttcaaaagacaatatgcctttatcatgagacctcctgattgttgcctgaatcatgcttacgcgttgattttttcgatcgtcactttagtgtaaggctgacgatgaccttgttttttatgaacgtttttctttggtttgtatctgaaaacagtgatttttttcgcgcggccttgtttttcaactttagccgttactgttgcgccttcaactgtagggttgccgactttcacgttgtctccgccaacaaacaaaacgtcttcaaaagtaactgtttcacctgcttcagcagcaagtttttcgatgtaaacagtttggccttcttcaactttgatttgtttaccgcctgttttaatgattgcgtacattctctgcacctcctattagactaagactcgccagataccagggggctgtaaaagctcttaacacctgtactgagcggttgtagcaatggtgctacatccataacattaaaaaatataccaaaatacaagccgtttgtcaatcagttttagtagggcagaagcagttcctccatggaagaattcgtccgcttatcggcaaagtaagcgtgcagcacttcattctcgtcaagctggctgagcttttggcctgatttttctataataatcggatgcttacagccacgtttgaactcggccatcacatgatagactttatcctccgcctttactgtcagcggcagaagtttctcaagctccctgttttttccgtaatacctttcgaggagaaatctcacatggatatagtgcctttgccgatattcctcaaacaaggaaacagccagaaagacaaacaaaacccatgcgctgatctgcagaggaatcacgaataaaacccagcacccgagcaacaggcagaagcagagcgacgtttttagattaagccggtgagccttttgaaaaggcagctgtttggaaaacaacaaaaataacagttttcctccatccagcggccagatcggcagtaaattgacaaataagatagaaagattataaaaggtgaagagttcaaaggtatgctgatgaatcactgagacttctgcaagcatccaggcggcaaactgaagccagatgtgctgaagagggccggcaataatgaccgcaaactcttcctttaacggccgattcccgtgttcttccacttcgaccgttcccccaaacggcagcaaaaaaacacgcttgattctccaagaaaaaaatacggccagagcagcatgccccagctcatgaatcaatacaatcaggagcagacataataatgctttcatatggcctgtgagcaagcccagcgccgcgataatccaaagaaaaggatgcacatggatctttaagataaggtcgagccatttattcaaatgtaatcacctgaatcggatcaataaatttatcgccgtctttcatggcaaaataatagacccctttattatgatcatcaagcttaatcgaaccgagctttttgcctttatccacaaaatcatataaagcaacatccacatctttgagctcgccatagatactataggtgttgtcagcatgctgcaccttaaccgtcagtcccgtctggctgtctttgctgacttcaaccacatagccttcttttacactatcaatcttatcgctgcttgtttcgactttaattccttccccattgtcctgaaaatcctgctgtactttcccggatgcaggcgcgatcagatctttgcctacttcaatctgctgttccttatttttgtgttcaggagccaggaaagcaagcggatttccgaatttggtttcgaaccaatggcttgctgaagcaaattgaaattcagtttcaaaggttttggctacggcgggtttaatctgactgacgggtccaatgtttgttttataggctatagctgaaacgagaacaaggcaggccgacagaagacatttcaggataattgaatctgttttcaccaatgggtgttttccgttgaatgttggcatgttatcttcgtagaccggaagtgttccatgcttttcctgatccgttaccatcacccaggacgggggtttctgcttttcagaaactgtctgagtagagaaacgttttgagccggaaagctgctttcttcttttctctaatcgttttctgatttcatctgctctgtgactcattgccatcatcctttgcattcgttgggtttgtacatcatatgtcttgtccatggcaaatattcggtttagtcaggaacaaagcaggcaaaaacaaaaaaacctgacacagcatttgctttgtcagattcttctctttaattctatcacattaagatcttacgccgaaaaatgacttaatcttagccatcattcctttattttgctcttcaagcacctgtaaaggaacagattcacctaagatgcggcgggcaatattgcgatatgcaatagaagcgcgatttttcgggtccatcgcaatcggttcaccatggttggaagctttgatgacttcatcatcatcagccacgattcctagcaaatcgatcgacaaatgctgtacgatttcgtcgatatccatcgtgtcaccgtttttcatcaggtgatttctgattctgttaacaacgagccgcggcggttcaatattttcctcttgctccagcagccctataatacggtcagcatcacgaacagctgagatttcaggcgtagtgaccacaatcgctttatcagctccggaaacggcatttttgtacccttgctcgattccggcaggacagtctatgatgacatagtcaaattcctgtttgagctcttggaccatgtttttaatttgttcaggagcaacagctgtcttatcgctcgtttgagcagcgggcattaaatagagcagatcatcgaaacgtttgtcttttacgagcgcctgatgcattttgcatctgccctctacaacgtctaccagatcgtaaataattctattttcaagacccattacaacatcaaggttgcgcagtcctatatcagtatctactaagcatacgcgcttccctaaaatggctaaggcggtaccgaggttcgcagatgttgttgtcttacctactccgccttttcccgaagttattacgatagcctcacccaattcacattcctccctcaagccttgttagatcaggtcttaaatgagccaaatgttgaaggcgttcaatgaccatatttccgtctgtatctaaataagcacattccatttcgttccctttttgaatgtggtctggggagcgatttaacacatgattgattcttaattgtgtcggaagcatttcagaggcggcgatgaccgcttgattatttccattaaacccggcatgcgcgattcctttcagtgagcccagaacaaaaatgttccctccggccctgactgttccgccgggattcacgtcaccgatcaggagcaagtcgccttttacctgcagcacttggcctgaacggacaatttttgaaacagaaataatttcggcttcctctcttatctgctgtgcttcttttttagtaatgacttcactgtcaatagaatgaacaaacaaatctttctttgacgcaatcaattcggttagctgttcctcttgctccttatataaaaagcgatttcccagcttaacatgaacgctgattttctggccttttccatcggtatattgttcaattgacagcatattctgaagaccatcgagaagctcatcaaaagaacacgcatcatccagatgcaatgttagtccattctttgttccttttattgttacatattgctgctttttggtcttcacaatattcacctcaacaacatactcatttcgtcaaaaaaagataaaatcctttttactcatctctcaattctttctttagactcataaaaaacaatctaaatggcagaacaagaataagagctgctgcaatatttaataaaattgtcggtataaaccggtcaagcacaaatccgttaaacgtcataatatctttatgaatcaaagactgaatgccgaatacgtaaaattcgagcagacagacagccagaactgctatcaatatcactacaaatgcgtttgtatgtaacactttaaacgcttttgaagccaaatagcatagccctgcaaaaccaaacatgtaaacgcctaatagacttgtatagttcatgtcatatagaaaaccaaaaataaatccgtaaatcatcgcgtgtttttggttgataaaagccgacatgaatatcaatacaagcatcaaaaaacgcggggcgagcacttggtcatctgtaacgaaaggaaaatgcaccaaatctgtaaaaatgctttccgcagaaaaaacaagcatcataacgaaagggagaaggaaacgtttcacgatccttcctcctctgtatcgacagtcggcacgtcacggttaacaacgatcacattatttaaatctgtaaggtcagccgcaggttttacataagcaacctttgtcagtccataggaatctgactcgatatcagtcacttcaccgattgtcagcccttctgggaaaacaccgcctgtccctgatgtttcaataagatcgccttttttcacgtcttgtttatccttacgctcaataattgtcatcttaagacgttttttctctttgtcatatccttcgatcaagccgtagcctttgctgcctttttttccggaaatttttgtcgcgactctgttattgcggtcagtatcgcttaaaagctgaacagcagacgtaaaattgttaagtccggagcttttgatcttgccgattaatgcgcctttttcgtttgtaacggccatatctttcgctacgttttgctgagtccccttgttaatggtgacctgtttggcccaattatcagggcttctggcgatgaccgttgctaaaatcggcttgtaatctttaatcgatttgacatggccaagctcgtcacgcaaggatttgttttcttcttcaagctcttgaagcttggcttcatattgtgtctgtccgtcaagtttttctcttagacgctcgttttctttgtatgtgttttttaaatcattgatgttctcaaatattcctgcaaaaaattcggcaggcgtatgaaaaatattttgaaatactcccgtcgtatcgccgatcactttctcaggccaggtggtattgcggccgcccttcagcgaaaatccaatcatagccaccaatatgataatacacagaagtaatagcattaaccgcttattcggcatcgtgttacacctcttctattgaactcccgattatctagttttccctttgaaaagatggatgtgctccagtgctttccctgttccgatcgctacacaatcaagcgggtcttcggcgataaggaccggcatttttgtttcttcgctgatgactttgtctaaattgcgcaaaagcgctccgccgccggttaacactatacctctgtccatgatatctgctgcaagctcaggcggtgttttttcgagtgtgctcttcactgcttcgacaattgtagatacagtgtcgcgtagagcattagaaatctcttttcctgtaatttcaattgttttcggcagacctgtgagcaaatcgcgtccgcggatttccatgttgtcggattcttcaggagcttctgcagatccgatttccattttaatcgcttcagccgtacggtcaccgatcatcaggttgtacgtttttctgatgtagttgataattgcgtcgtccatctcatcaccggctacacggattgactgagacgttacgatgcctccgagggaaataatcgcaacttctgtcgtaccgcccccgatatcaacaaccatgcttccagtcggttcccaaactggcagattggctccgattgctgcggcaaaaggctcttcaatcggatacgcgtcacgcgctcccgcctgtcttgtcgcatcgataacagcgcgttcttcaacagctgtaatgcctgatgggacacataccattacatatggttttctggcaaacatgcctttattttttatggcttgattgatgtaatatttcatcatcgtcgccgttgtttcataatcagcgataacgccgtctttcatcgggcgaagagccaccacgttgcccggtgtccgtccaatcatatttttcgcatcatttccgacagcgacaatcgatttcgtatccgtctgcaaagcgacaactgacggctctctcacaacaattccttttccttttacaaaaacaagcgtattcgcagttccaagatctataccaaggtctctagcaccaattccaaacatatgtatgtatcttcctttcttaaagcaaaaataccctaaagggaaaaactcataaactctattatagcttaattcgacgaaaaaaaaagtgttacaaatatcctttttcctttaaactcacaaattttttatccccgatcaccaaatggtcaagcagctcgatgccaatcaggtttccgcattcaaacagccgtcttgtcacttcaatatcctccctgctcggcgtcggatctccagaaggatgattatgaacacagataaaggaagcggcagatcgtttaaacgcttctttaaacacctctcgcgggtggacaatagatgaattcaggcttccgataaatacggtgcgtttatggatgacttgattttttgtatttaagtataaacagacaaaatgctcctgggttaaaaagcgcatatcctccatgacgagattagcgccgtcttccggggagcgaataacgaaatgttcttcgttggctaatttgtgaatccggcttccaagctcaactgcagccagtatttgaatcgcttttaccataccgattcccgggatgcttgacagctcttcaaccgatgcttccttgagcagacgcagcccgtcaaatgagcgcagcagccggtttgacaggtccaaaacagattcgtgtttagtccctgtccgcaataatatagccaaaagttcatgattcgctaagttctcggctccgactttcaggagccgttcccttggcttttctttcattgggaaatctttgagttttaatggcagatcgcgtatgaccaagcactccttttctttcccttcccgtttatagaaccgtcatgcccttatatcaaaatggcgaagagctctcattgtttttgatataggaaggcccatgactgaataataatctccgtctattttctttacaaaaagcgcgcctcttccttggatgccgtatgcacctgctttatccatcggctcttttgtttcaatatatgtccaaatctcttcttcactgagggaccaaaacgcaacttctgtcttatcataaaaagtctcgctgtgattttcagcttgaatgctgaccgcggttattactgagtgacttcggcctgaaagcctccgcagcatagaagcagcttcttcttgatcctgcggtttgccaagacattcgccgtcaaggcataccattgtatcagcaccgataacgattgcatgcgggtggagatcagctacagccttagctttttgttttgccaaccattggacgttttcttctggtgaaaagtttcgatttaatttttcttctacttcactgacaataatggagtagggcagctgtagaagatcgaggagttctttcctgcgcggagattgtgatgccagtattagcggttttgtcatgttcgtcatcctttcagggtttgcttaagaaaaaaagatactcgtttatcctaccaaatcacgaggcttgtcacaatttcagaaaaataactttttcatgacaaaataaaaaaagcctgtcactaaaggacgaaggctcagggcactatctcttattttacgacggctaacagctcctgctgagccttccacccggcttcagcacttggatcctctaattcctttaaagcctgcaaaatcgcttttttctctcctgtttctgacgcttttgtttcaccaagcgacttttctattttctctacactcgcttttgtaatgtcttcgccgagaatcgcctttgctgcaagctccgctgtttccttaaaagaatctgtcatatctgactctattgataaggaaagctccttgcctccccaggcttcaaaatcactgtcgattaaaacctgtcctaactgctgtgagacatccttatcactggctaagcccgcgatgacatacgtatacccgtcatcctttgacagtgacacggcggaatatcctttttcggtcaattgttctgttaacgtttcggcgcccttttcatttgaaaattttccggcttgcacagcgtatgttttgtatgtaccttcagtttgtgcttgtttttctgcgtctgaggtttgtttatcagcagaagtatcccctgcttttgccgtttggctgcctagagaatcctctaaagaggccggtgctgacgcttctttattccccgatatgtttaacgcgaataaccctaatccagtgccaatgacagccgcgaaggcaatcgtcgcagccactctttttactggtttggcagtcccggtctttccttttgcataagactttgtttttttcttttgataaggaggaacaactttagggtcctctttaaacaccttgtccccctcggaatcccaattgaattcatcttcatcagggtgttcctgggatgccgcaacctcttgttctgcctgtcttttttcctcccaatttgaaaatgtcatgcttctatctgcctctgtatcaggtgtctcttgttcgtaaaccgtctcttcttttccattaatcgtcaccttgagggctttttctgcggctttactgttttttttattctttctttttttcaattccgcttcctcccttcatttgcttgaccgttcttgtcggcttttcatgctacacactttagcacaggcaaagaaaaaaagaacaagacttttgtcgccttgtccaaaaaacgttcgtcaaatttttcagcagtcagcccaatgccattttgatataaaaagaaatgatagagtcaccgtataaataggctaaaatgctccctgcggccatagcgggggcgaagggaagcggctgccttttagcgagtctaccagtcagaacagctgccgctccatataatgcacctatcaaaactgaaaagaaaaaggcagctgccagcattttcacaccaagcacaaagccaatcaccgcaaataatttaatatctcctccccctactcccccatgggtgattgcggcaattacagccagaaatagaaatccggctgccgcacctagcaggcctgcataccaggaatcaagcggagaaatcaatctcgcggccgccaaaaagggaagaaagaaaatcaatattcgatttggaatcagcataaaatgaatatctgtcactgcaacaataatgagaagagagataaacaccacagcgggaaacagttccagcgatgtgccaaagcgtattcctgcggcagcaaataaacacgctgtcacaagctctgctgcgggatacataaaagaaatcctatgcccgcagcttttacatttacctttttgaaataggaatgacaggatgggaattaattctgcaggagttaatgtccgccggcaaaacgggcatgatgaacggggcgcaataatagatagatgtaaggggatacggcacccggccgtatagtaaaaagaaccaaggatcagcccaaagataaaaagaatggatagcatagacaacacacctttactcattgagttctggtatggattgtagcaaaatggacatcctgagctccaattgggaatattcaattttacacataaaaaaacggcagaatcttttttttgattctgccgagccggatgcttttatttcaacctttttcgaatgtcagaaataaagtaaagagatccggtaatcagcacaatttcatttgagccctttttgctttctatgaatttgatcacatcgtctggatcttcactccagcttttattgctgatttcacttgcatcatagagatcttttgcaagagaagcacgcgggaaatcaaaagaagcaaaatgcatcgcatgagcaatggtttccagtcttttaatcatgttctgatacggtttgtcctttaacgcgctaaacaccacagaaatgcgtgaattggcgaaacgctgcttcatcgtttccgccagcttttcaacaccttcttcgttatgcgcaccgtctaaatataccggaggatgctcctgaacaagctctaaccgtcccggccaagcagccttcacaagcccgctccttaacgcttcgtcactgatatgggcgatattctccttattgagccactccgcagccaaaatggacaaagcagcattttgtctttgatgggtgccaatcagagatgtccgaatatcttcatagcatttctcttccgttttgaatgaaaactgttctcctgcaggcagagcctcttcattgaaaataacacatgcatcatgcaatgactggaacggcgcagcatgccgttcggcttcatggcggatgacctgtaaagcttccggctgggtaactgctgtaacgattggaataccttctttaataataccggccttttctcctgcaatttcttcaatggtgtttcccaaaatattcatatgatcgtgtccaatgcttgtaatcacagttaagagcggttcaaccacattagtagaatcgaatctaccgcccaaacctgtttcaaaaataacaaaatcgaccttatgaaattctgcaaaatataaaaatgcacaggccgtcataatttcaaattctgtcggctgtccgtattccgtttgatcaagggcttcaacgtgcggtttcatttgattgacgagtgctgtccattcctcatctgaaatcggtatcccgtttacgctgatccgttcattaaacgtaataatataaggcgatgtaaatgttccaaccgtatatccggcttcctgcagcatagaacggataaaagcgacagttgatcctttaccgtttgttcctgcgacgtggaacgctcggatttttttttcaggatgtcctaaccgcgccatcagctgtttcattcggccaagtccgggcttcaccccgaatttcagcctcccgtgaatccagctgcgcgcatcttgatatgcagtaaacaatgataatcccctcttttataagacaaggcggtttctctagaaaccgccccggcttttcattaacccttcagctcagccattcgtttttgaacagcgtcacgcttcgccacataatctttttctttttcacgttcttcatcaattacgtgtgcaggcgcttttttcataaatccttcatttccaagtttcttttggacacgctcaacttcttttgtcagtttatcaaattctttttgcagacgggcaatttcttcatcaatattgattaagccttcaagcggaagaataacctctgctcctgagacaacggccgtcatcgccttatcaacagcctcaatatcggtgccgattttaagcacactcggattcgtaaagcgttcaacatatgaacggttcgcttcgaggcgggctgctatttcgtctgtgcttgttttaatgtacagttcaacctgcttgctcattggcgtattgacttcactgcggatattgcgcacagaacggatcagctcaacaagaagcttcatgtcagctgccgcttcagtatcggtatgctccggcactactacaggccattgacttactgtaatcgattccccttggtgaggaaggtgctgccaaatttcctccgttaagaatggcataaacggatggagcagacgcatcgtttgatcaagtacgtaagcaaggatggaacgggtagttttcttagccgcttcgtcttctccataaagcggaagcttcgccatttcaatataccaatcacagaaatcatcccaaataaagttatataaatggcgtcctacttcaccaaattcatatcgatcagcaagctgggtcacgtgctcgatcgtttcatttaatcgcgttaaaatccacttgtcagcgactgacttttcgcctgagagatcaagctcatcgtacgtcataccatccatattcattaatgcaaaacgggaagcgttccaaattttattggcaaaattccaggtcgattccactttttcatagctgaagcgcagatcctggccaggagagcttccagtcgcaaggaaataacgcagagaatcggctccgtacttgtcaatcacatccatcgggtcgacaccgttgccaagagatttactcattttccggccttgctcgtcacggattaagccgtggattaaaacatctttgaacgggcgctcgcctgtaaattcaatgccttggaaaatcatgcgtgatacccagaagaaaatgatatcgtaccctgtcacgagaacatctgtcggatagtagcgtttaaagtcttcagcagttacatcaggccagcccattgtggagaaaggccatagcgcagaactgaaccatgtatccagtacgtctgtatcctgttcccaattttcgctgtcttccggcgcttcaagcccgacatatagctcgcctgtttctttatgataccaggcaggaatacgatggccccaccacaattgacgggagatacaccagtcgcggatgttttccatccagtgtaaatacgttttttcgaaacggtcaggcacaaagttgaccttttcttctttcttttgcagctcaatcgctgcatcagcaagcggctgcatgcgcacaaaccattgtgtagaaagataaggctccacaacagccccgcttcgttcactatggccgacagagtgcatatgatcctcgatcttgaagagaactcccgcctcctgtaaatctttcacgagctttttgcggcattcaaaacgatccataccttgatattggagcgcattttcattcatcgtgccatcttcattcatgacaaggatgcgttctaaattgtgtcggttgccaagctcgaagtcgttcggatcatgagcaggcgtaattttcacggcaccagacccaaattccatatcaacatagtcatcaccgacaatcggaatttcacgatttacaatcggcaggatcaccgtttttccgataaggtgtttatagcgctcgtcttcagggtgaacggcaacagctgtatcaccgagcattgtttcaggacgtgtcgtcgcaatttcaattgagcctgaaccgtcagcaagcggatagctcatatgatagaatgcgccttgaacatccttgtaaatcacctcaatgtcggatagggctgtttttgtcgctgggtcccagttaataatatattcgcctctgtagatcaggcctttttcataaagcttaacgaatacttctcttaccgctttgctcaagccttcatccagcgtaaaacgttcacgggaataatctaggccaagacctaatttcgcccactggctgcgaataaagtcagcatattcttccttccacttccacgtttcttcgaggaatttttcacggcctaaatcgtagcgggatttgccttcttcacgaagtttcgcctctactttagcctgtgtcgcgatgccggcgtggtccatgccaggaagccacagcacatcatagccctgcatacgtttcattcttgttacaatgtcttgcagcgttgtgtcccatgcgtggccaaggtgaagtcttcctgttacgtttggcggcgggatgacgacagagtatggctcttttgtctggtcactgcccgcttcaaaaaatttgccttttagccaaaaatcatatcggtctttttcaaccgctgccggatcatatttcgtcggcattgtttgttcattcgtttccatcataaccctccagcatgtttaaaaatggctgagaacgaaaaaagagctcttcatccctgtaaaaggacgaaaagctctttcgcggtaccaccttttttcatgaactctatcagttcatgcacttataacggataacgggtgtttcccgaatttctctactcttctttcaagaaattatgctcccgggcgaccttccaatcagacaacataagaagcctttcagcaaacggcttctctctctgcatgcgccttttttgtactcttcccgttctaagcaggtgtatttatcagctcattgtacattatttatgttctttattatagtaaaagtgtttttgattcgtcaatcatcttttccaaaaacaccgctttctatacagatgggcaggcacctattgcccaagtttacatatgatgcttgtaaatgcgtagaggaggatgcaccgtgaagaaacgtttcagctcttattcgctgccgccatgggtaaggcaaattcggcttgtatccgcacaagtgattattcccattacgatttttcaaggaatcagaaccattttctttccgacaacctttgatgttttgctgctcgcaatcctaatctttttagcttgcgcccttcatttagaatggatataaacaaacaagtccgcgccattaagacgtggactcgttttcagcctgaaattttttctcttgttcaatctgatgaattttcatcacaaacggctctatatttttcatttgccaataagcctttaataattgtgtacattcctctttttcatgctgtcgtttcccagtttgataaccgttcagcaccttgtacatggctgccggatatgccatatagctgagaaaaaggctgacttccgcttcacgcaaagggaatgatttcgtatatccataaaaccattcgacgcattccggacaagctttcggaaagcctctgaacatttttgtataaaagccgagcaggtcgttttgcggaggaccgacagatgctctttcgaagtttgtaaaatatccggtcccagcatcattatacagaaaatggtgtatagacaggctgccatggttcattacaacccttgaaacgtccttttcctttgcagactcataccagtcctccagccgttccagcgcaaagttcaccgcggaaatggtttctgaaaaataggttatggcctggagttcaaaaggagaaaggtaccattccttctccgctctatccacaaactgctcatagaaaattttatcttgttcccacttttttttcgtttgcccgtaataacgttcaatctcatcacgtctaacctttagttcctgcgcggttctctcgtgaagacgggctgtttctctaaataaataagcatgtttctgatcccgttcttcctcttggtcaaattggagccaaggcattaaatagtaggtatctccgtattgtatgcctgctgagaaaaactcaccgctatttgttctgtaaacgggaacgaatgaacgaaagcctttttcctcaatcgccaccatatgatctgtaaaatgcttgccgcgaccttctttcaattttttcagggcaaatatgccgtagtctgtatacactttccaaacaagaggactgacaggctcaataaattgagcagtcagtccgtattcctgaagaaccgattgggtatcttccatttcattcaccacattttccgatcacttacggtttacgcatggctatttttatattgaggaatatagagaatctgtcctgcttttaattcatcatccaatgctaaagaattcatcctgatcagctgctgggatgtaatttcataccgttcgcataaacgctcgatcgtatcttcctgctgcacaatacaaattttcattctcgaaaactcatccgcttcttttgtaaagagttttgttaaataaagagaattatcactttcctttgtttgaggttccttcgtttcagcagcaggagcaaccctaggaacagcatccgtttccttcctttcagtctcagaagattcaggcagctggaaggattgaaaaggtgtttcttccttaggctcttcaggtgatggtgtttttctcacttcaatttcgaagctctcttcctcttgttcttcctcctccagcagcttaggcgctgaataaaaagaatcctcctcttcttgttcagacaggaaggtacggtatgccggttcaggcaattcttcttgagatgcctcctccgagcttgttttttgattgaaatggaaatgtaaatcggctttgtcattctccacatatgcagctgaagctgtttctctgctatcttctatggagagagcagcctctgatacactctccaaagcttcatccgcttccgcctcttcttggcaaagcgcaggatcagcctgatccgattgagctgcttcttcattttgagcctcttggcgcagcgcatattcatgattaggagacactgttgtttcctctttttcctttgcaatcacagtctctgaatgaagctcagcttccaaagcaggcgattcttctgctccagcgtgttcacgaggctcagtctctgctggagagtctgcttcttcacgaacatccgctattgcagctgccggctctgccgtttctttttttgctttaacgatctcttgaatctctatttctgaaggatcaggttctggctcagattcttctgtttccgattcagcacgaacctccttttccgcagcaagctcttctgactcttcttcctctttcacatcttctctggcctctggatctgaagcaaccgattcaggcggctcagattctgctttttctgtctccagttcttcacggagccccgctttcgagataaaaagttctggcggttcggctggcggttcatgctgaagaactgcttcctctgccgatgatgcacccggttcttctactacactatgtgccggcggctctgaaagctcttcctccctgaatgccgcaggagcttcatataaaggtatctccggctctttgtcttgcgtatcgtccaaaagcccttcgatcgctaaatcagcttgaattgttaaaatgcgcgaatccgtcaattgatagtcaaatgcgtcaataaagacgaagacatcctgtaaatggctcactttatttttcggaatggtaatatccacaggaaaacagtgagtcagttccgcacttccatcctctctctttctgacttgttcaacaaaccgcttatctgtataaatctcttcggtatgtttgttttgatctatgttgtactcacctgtaagttcaagcgatcctatgattgatacataatcatttacttcctgaaccctaatatcaggatctaatgaaatagaaagcagttcagaaacttcctgtcctttttggaaacagatcgattcttctacagaaaattgcaatcgatgattttgtggcaagttcatatcctcctttcatctaatccttaaaattagatgtcactaaaggtgtatgtatgaactggagaaaatatgagtgggagagcacgaaaaaaccggcacaaggagtccttgataccggttttcactcttatctgcggctgatctcagcaaatactttctcagctgcctggattgtgttttcaatatcttcatcagtatgggccgttgagaggaaaagaccttcgaattgtgatggcggaaggaataccccttcatttgccatccctttataatagcttgcgaacagcttcaaatcagatgatttcgctgtttcataattgatgactggttcgtttgtaaagaagaaaccgatcatcgaacctgcacggttaaaggtatgcggaatgccatgagcctcggcggcttttgaaattccttcttccagcctgtcgccttttttgatgaaattcttgtaggaatcaggtgtcagctgtttcaatgtctctaagccagccgtcatcgcaagcgggttgcctgacaatgtaccagcttgatagatcgggccgcttggagcgatctgctccatgatttctgcctttccgccataagcgccgacaggaagtccgcccccgattacttttcctaaacaagtcagatcaggcgttacgccgaagtagccttgagcgcagttataatcgacccggaagccagtcatcacttcatcaaaaatcagcagggagccgtactgctcagtgatatcacgcagaccctgcaggaaaccttcttgcggcggaacaacacccatatttccggcaactggctctacaatgactcccgcaatgtcttcaccgaattgctggaaagcaagctttacactgtctaaatcattgtacggaacggtgatggtgtttttcgcaatgccttcaggcacccccgggctgtcaggcagaccgagagtggcaacacctgaaccagctttaatcaagagagaatcgccgtgtccgtggtagcagccctcaaattttaaaatcttgttgcggcccgtatagccccttgccaaacggagggcactcattgtagcctctgttccggagcttaccattcggacgatttctacagatggcacacgatcaatgacgagcttagcaagttcattttctacttcagtcggagcaccgaagcttgtcccgtattcagccactgttttgaggctttctacgacgcggtcatttgtatgccctaaaattaaaggcccccatgacaagacgtagtcaatatattcattcccgtcaatatcaaagattttcgagccttttccgcgctccataaaaatcgggtccatgtctaccgatttaaatgcgcgaacgggactgttcacaccgcccggcatgagtttttgcgcttctttaaaagccgtttttgatttttcatagcttctcatctgcctcaactcctgtcaactgaataaaattactccgcaagccatttcgctgcgtctttcgcatgatacgtaataatcaggtcggcacccgcgcgcttcatgcttgtcaaaatttccaacacaatttctttttctttgatccagccgttctgcgctgcagccttcaccattgaatactctccgcttacattataagcgacgagcggcaaagtaaactcattttttacgtcacgcatgatatccatataagaaagcgaaggtttgacaatcaaaaagtccgcgccttcctcgacatctgattgtgcttcgcggagtgcctccatacggttggcagggtccatctgatatgttttgcggtctccgaattgcggtgtgctgtttgctgcatcacggaacggaccgtaaaactcacttgaatatttaacagcgtaagacatgatgggaatattgacgaatccttctttatcaagtgcttctctgatcactgtaacaaatccgtccatcatgtttgatggcgcaatgatatccgcacctgctttcgcttggctgacagctgtctgcgccaaaagttccagcgattcatcattgaggatgaccccgtctttgacaagtccgcaatggccgtggtctgtatattcgcacaggcacgtgtcagcgacaacaaccatttcagggaagtgttctttaatttctgtgatggctttttggacaattccgtgatcatggtacgcttgtgttccgcaatcatctttttcttccgggatgccgaacacgataacagattgaatgcccagtttgaccagctccgctacttcatccttcaataaatctaatgatacatggtaaacatcaggcattgacggaacagcttttttgccttccagcccttcaacgacaaaaatcggataaataaaatctgatggatgcaaacgtgtttcctttaccatttctctcattgcttttgatgtccgcaggcggcgatgtctattaaatgattgactcatattctctcttcctctcttgacatgctgcacattaattcaagcatgccatctattgtaaatgtatcaggcgtatgcgatgtgatgccgtacgtcagaagggcatcatttgttaaaggcccaatgctgatacaggccgtcccattcgccttccacttttttaattcttctcccaagacatgcataaacgtatgtacggttgatgaactcgtaaatgttacatagtcaaaggaatattgacccgcagcgtctttcagtgcctcaatgccttcttcatccggaatcgtttcgtagagaacccattcctttacttcaaaaccgagcgggacaagctcttgttttatcacatcacgtgacaaattccctttcatcacggtaatgggctcccccggttcagcatgctgcttaagagcgtcagccaattgttcagcaatatactcctgtggcatcacatcaaccgatacgttatgcgtttttaaacggcgggcggttttttcaccgacggctgcaatttttttatgcgcagggagaataagctgattttccttcagataagaaaaaaagaagtctgccccgttcacacttgtaaaaacaagccagcctggcgcggcaagatcctctcttacctgttccgcaacatcattcggcaaagcgcggcgaaacgtaatcaaagaggttaaaaccgctttaccgccaagcgcctccactttttgctgaaatgatgttgcctgtgccttattccgggtaacaagcactgtttttcctttcaacggaaaatcattttccatcctcatcaagctcccgttttacacgatcaattaaatcttttgctcctttgtcagccataagagcggcacagcgctttcctacttcctccggatcgtttccggtgacggtttctttaaaaatgattttgccgtcaggtgaagcgacaagacctgtcatttcaatttcatcctgtccatttaacacggagtagcctgcgatcggaacctggcagccgccctccatcgcgtttaaaaaagcacgttccgctaagacagtccgttttgtatattcatctgtaaactgagaaaacaacgccaacagctcttcatccgattctcggcactcaatcgccagtgctccctgccccacagcaggcaaacagcgctcaggctcaaggaattcggttacgacatcttgcttccaacccattctagaaaggccggcagccgctaaaataattgcgtcataatcctctgtttccagcttttgaagtcttgtatctatattacctctaatccatttaattgtaaggtcagggcgctcaatcaaaagctgcgcgcttcttcttaaactgcttgtgccaacgacagcaccttccttcatttctgaaagctttacgcgattctttgaaataagggcatcacgcgggtcctcccgttcaggaatacagccgatcacaagaccttcaggcaaaacagcaggcatgtccttcatgctgtgcactgccatatcaatctcttcgtttaaaagcgcctgttcaatttctttgacaaacagcccttttccacccacttttgagagtgtaacatctacaatccggtcgccctttgtcacgatctctttaatttcaaaagcaaacgaaggattgatttccttcagtttttgaataacccattttgtttgagtcatagcgagtttgctccgtctggaacctactttaatcgttctcatcatttctttcctcccgaatctgcttgggacatcgtttaactgaaccaatggaattgcgacaggcttccaagcaggaaataattgatcatcagcaccagaaaacaagccgtattccacagtgctgcgacctttccttgcagctctttaatcagcctgatataaagataatagctgtacagcagcaggacgacaaacgaaccaagcactttggcgtcaaaccaatacagcgtttctagtgagacatacgcccaaatgacgccgagaatcaaactcagcagcagcatcggaaccccaatgacatttaaaacatacgccatataatcaagcttagataaatcttctattctcaacagccattttccccactttttctttttcagcagatgatattgaaacatatatagcacagaaaaaacgaaagaaagggaaaaagcgccgtatgaaagaatcgccattgtaatatgaatcaccaaaagctcggatacaagctgcccggaaaaagcagctgactgctgctctgtcggtgaaaatgtgtgaatggcgatcatagaaaatcctataacatttgtaaaaaacacgataaagtcaacacgtaaaagctttgtcagtacaagtgacagcgtgacaagcacccaggcataaaaataaagcgcctccgtcacatttaataccggaaaccgccccgtcacccacataaaataggccaaatacacggtttgcagagtccagacaatagaaagcaaccagaaggccatttttccagccttccggttgtgttgaagaaaatctataaaataaaagagtacacttaacgcgtaaatgacgattgtcccctcattaagtcttgccattgcagtatcaatcattcagctttcactcacttacaagtgggctaaagcccgcttttgattcagccttcttaaaagagtggaccttctggctgctttccacggttttcatcatttgacggcccgcagcttcttcaatatcaaaaatctgcataaacaacgcgagcttttcttcagaatcagcatctgccgcaagctctttcacctttaaaatcggatcacgaagcatttggttaataatacttttggtgtgtttgttcaacagttttttctctcttgtgcttaagtgaggcagcttacgctcaatgctgtccatcgtttctgactggatagcaagcgccttttcgcgcaatgcagaaataaccggcacaacaccaagtgtattcatccattgtttaaattccacaatggtttcttcaattaacagttcaactttttcagctgtttctctccgctctttcatgttcgcttctacaatgccttccagatcgtcgatatcataaagaaaaacaccttcaagatcattcagcgccggatcaagatctctaggcacggcaatgtcgaccataaacagcggacgtcccttgcgaagcttattcgcgttttccatcatctctttggacacgacaaattcacttgcaccggttgaactgattaaaatatcagcctccgcaagcgcgctttcaagctgattcaagcttctcgcttcacctgagaaacggtctgcaagctccttcgctttcaagtatgttcggttaatgacagtgaccttgccgattccctgtccgtgcaggttttccgcagcaagctcgcccatttttcccgcaccgagaatcaatatgtgcttgcttgaaagatttccgaagatttttttagcaagttcaactgcagcatagcttactgacaccgcatttgagccaatgtctgtttcggcgtgagtccgtttgcccactgtaaccgcctgcttaaacagctcattaaaaatagtcccgatcgttttttcttgctgagctgttttaaagctgtcgcgtacctgtccgagaatctgcgtttcgccaatcaccatagaatcaagtccgcaggctacacggaataaatgctcaacagcggcatcgctctcataaaacgttaagaacggtgacagctcttctttgcttaattgaaaccaatcagctaaaaacttttttatataataacggccggtatggagctggtcgactaccgcataaatttcagtgcggttgcaggttgagacaatgatgttttcaagaatgcttttctcttctttcagctgcaccattgcttctgccagctcattcggctgaaaacttactttttcacgtatctcaataggggcggatttataatctactcccacaacaagtatatgcatcgctctaattacacccccaacgcccaatcttaatttataatcattctaacatagaactcattatttataataattataacatagtttctttcacaaaatgtgaacagattttaaaattcttatgctatattagaaaaagcttcagggaaaagaagcattcctattgacaataccaaaaacagcagaaatttactacacatcagctctaaaaaacaagaaggtgatatgcatgaaacaaaaatcaattttattcccttgcctgctgcttgccgcttctgtatatgcatggcttgaaagcggccaagctgaactgttttcgggacaggatcaatggcctgttctcctcatgctgttaggagcagcctttgtatatcaaggaaaaaaagaagccgttgcaccccatttctttatcggtttgcttctcttcgggatcggtttacacttttttgccaagccgaaatgggtatggtggccggatgattttgaaatgcttctctttatgatcggcttctcactactcgtttcaaccgttcaaaaaaaagaatatgtatatgaagctgtgtcgatgatttgtttttccctgtttttgtactttttcaaacaaattatggcatggcttgagtctgcgcatattccaacagcgcttctgaaggagtattggccgtttgtctttattggaatcagtttattgttattattgataaaacgaaaaaaatctatacgataaataaaaccggtagaggatcctctaccggtttatcatttttttgatcgctccccaagcttcgtcttttccctttttcgtttctgaggaaaagagaatcagctcgtcttccggatcaatatttaatgtttgtcggacaaccttcgcgtgtttgtcccatttgcctttcgggatcttatccgcctttgtagcgataacaataacaggaatgccgtaatactttaagaattcatacatctgtacatcatcattagatggcgcatgccgcaaatcaacgatctgcaccacagcttttaattcctcgcgtgtcgtgatataggtttcaatcattctcccccatgcttcacgctcagactttgacactttggcaaaaccgtagcccggcacatccacaaaatgcaactcatcattgataatgtagaaattaagtgtttgtgtttttcccggctttgatgacgttctcgcaagatttttgcgattgattaatgaattgataaaagacgattttcctacgttcgatcttccggccaatgcgatttccggaagccccccttcagggtactgttccggttttactgcactgatcacgatttctgactttgtgactttcatttcttctctcctactaaggcatgttccaaaacctcgtctaagtgggacgccaatataaatgtcagcccctccctgacgctttccggaatatcctctatatctttttcattatctttaggcgcaataatggtcgttaatcccgctctatgtgcgccaagcgctttttcctttaagccgccgatcggcagcacgcgcccgcgaagcgtgatttccccagtcatgccgacttcacgcgaaaccgcccgtcccgttaaagcagaaacaagcgctgttgccatcgtaataccggctgacggaccatcttttggcaccgcaccctctggtacatgtatatgaatatcatacttctcatgaaagtcaggttcaatgccaagttcttctgttttggatcgcacatagctgaatgcagcctgagcagactctctcataacatctccgagctttcctgtcaggattaatttccctttccccggagaaagcgatacttcaatcgacagcgtatctccgccaacggttgtataagcaagccctgtcactacaccaacctgatcctctgtctcagcttgtccatatctgaaaatacgttttccgataaagtcttgaaggttcttctcagtaaccgtaatccgttttcgctcttcagcaacaatggcttttgcagctttacggcaaatcgcggcaagctggcgttcaaggcttctcacaccagcttctctcgtatagtagcggataatatcaagaatcgcctgatcacgcagctgcaggttgcttttcttcagcccgtgttctttgatttgctttggaagcaagtgatcctttacgatttcaagtttttctatttctgtgtagcctgcgatattaataatttccattctgtctctgagcgggcccgggattgtggccaaattgttcgccgttgcgataaacagcactttggataaatcaaaggtttcttcaatatagtgatcactgaagctgctgttttgctctggatcaagcacttcaagcatagcggatgatgggtctcctctaaaatcagatgacattttgtcaatttcgtctaataagaagaccggattcagcttgcccgcttttttcatcccttgaataatacgtccaggcattgctccgacataggtccgtctgtgtccgcgtatctctgattcatcccgtactcctccgagtgagattctgacgaatttgcgtcccaagctttttgcaattgatttggctaaagacgtttttccgacacctggaggtcctgccaaacagagaatcgggcctttcagggatttggtcagcttctggacagccaaatattctaaaatacgttcttttactttttcaagcccgtggtgctcttcgtccaagagacgtcctgcttctttcaaatcaagcttatcatctgtttcatccgtccacggaagagcaaccagccagtcgatatagttgcggatcacagagctttccgcagaacttgacggaattttttcatatctgttcaattctttaagcgctgtttctttcacatgatcaggcatgcctgcttcttcgattttttccgtcagcgtctgaacttcgccagttttgccttctttatcgccaagctctttttggatcgccttcatttgttcacgcaagtagtattccttctgcgtacgctccatcgaacgtttgacgcgctgaccgatttttttctcaatctccagcacttctttttcattattaataaaatcaatgaccttgttcagcctgtctttgacatcagccgtttctaaaatatcctgcttatcctttagtttaaggggcagatgagaagcaacgatgtctgccattctccccggctcttcgatatcagtaaccgcagcgtacgtttcggccgagatttttttagaaatttttatgtactgatcaaagtggtctagcaaagtccgcatcaatgcttcgtcttctgtatcttttgaatcatcttcatgaataagttgaatgtcaaccgacgtgtaatcctcgtgttcattgtatttgacgatatgggcgcgcttgaggccctccaccaacacacgaatcgtaccgttcggaagcttcagcatttgcttaatttttgtataggtgccgacagtgaaaatctcgtcttcaccaggttcgtctatcgaaatatcctgctgagtggctaaaaatatcatatgatcatgcatcattgcctgttcaagagcctgaaccgacttgtcacgtcctacatctaaatgcaaaaccatcgtcgggtacactaataaacctcttaaagggaggagcgggatgctgcgttttaattcttctgccatgtgactgacacctccgtgactttagtatgaaccattataatacaactttttcatccttgtacaataaacggcatggttccattttctataaaacagtctcctcgtagtataccctttctttctgatatgaaaaaggaaaagatgtccttcatgaaaaaaaccctattatcaaaatagggtttaaacggattctttattgatttcgatatgaaacggtttttgttccgttggcggattcaccaaaatttcatcaagcacttcttggaacgtcttcactgcaataatctcgatcccgtcaatctgctttaagatggcctgctgattttcatatgggataatcacctttttcgcaccggactgcttggccgcttttattttcggaatgacgcctccgatgggtttcacaagaccgttcaggctgatttcgcccgtcatcgcaacggtattgtcaataggaattttgtgtatcgccgagaaaatccccgccgccatcgcaatgcctgctgacggcccatcaatcggaatccctcctgggaaattgatgtgaatatcataatcagaaggcttcattcccattgtccggagcacggttaatacattttcaaccgaacccttcgccatgctttttcgcctgatcgattttgattggctgccgatgctttcttcttcagctattcctgtgatgttaattgatcctttatcttgagccgcggttacacttacttcgatttccagaagcgatccgctgttaggcccatagactgcaagcccatttacaatgccaacctgtggttcaacaccgattttttgctcgtgctttggagtaagctgactggagtgaatgacccattcaatatcctcaatcgtaatgtcctttcgattctccgttacagccatccccgctgcgatttgaatcatattgacggcttcccgcccgttccgcgtgtagctggtcaaaagatccagtccttcttcggagataattttttcaattttatccgctgctgttttggcaaccgttttcaactcgtccttttcaagctcgcggaaaaaaacctccaaacagcgggaccggatagctggcggaatttcgtttggcattctcgtggtcgcgccaatcaagcgaaaatcagccggcagcccattttgaaaaatatcatgaatatgattcggaatttgtgtattttcctcactgtaatacgcactatctaaaaagacttttctgtcctcaagcaccttcagcattttattcatttgaataggatgcagctcccctatttcatcaataaacagcacaccgccatgggcatgggtgacagctccctgcttcggctgcggaatcccagcctgtcccatcgctccggccccttggtatatcgggtcatggacagagccgatgagtggatcggcaattcctctttcatcaaaacgggctgttgtcgcatcgagttccacaaagacagcctgctctttaaacggtgattgtttatgtttttttgcttcttccaacacaagccgcgcagcagccgttttcccaactcccggtggcccatagacaatcacatgctgaggatttggcccgcataaagccgcctttaatgctttaatgccgtcttcctgtccgacgatatctttaaagcttttggggcggaccttctcagataatggctcggacaagctgatagcgcgcattttccgaagctgctccatttccttctttgattctttatctatcgtgaccttttgtgtcctttgatttttaagcaaattccaaaaatacaaaccgatgatgatcccaaaaaacagctgaataaataacgcgatccctgtccaactcatggtggtccctcctgaaaaacaatttatgtatccaattcattcctctgattgctagtatctcccatagaagacgggaataaacgtttttccggaagagttgcatgcaaaaaaacctcctgagtgttaccactcaggaggtttgtgcttatctttatgcagatgttttatcttggcttacctcagtgccgtcttttaataagaggcgaggaggctctccgtgtgtcacagttgccccggtgattacacatttttcaatgtcatcacgagaaggcagctcaaacatcacatcaagcatgatgccttcaatgatggaacggagtccgcgtgctccagtcttgcgttcaattgcttttttagcaatttcagaaagcgcttcttcttcaaactcaagctcaacgttgtcaagctcaagcattttcttgaattgcttaactagagcgtttttcggttttgttaagatcgcaaccaatgcttcttcgtcaagcttttcaaggcttgcaataaccggaagacgtccgataaattcaggaattaacccgaaacggagcaaatcttcaggaagcacttttgaaagaagatcttctttctcaagatcagcagctttattgtcggcaccgaatccaatcactttttggcctaaacggcgtttgatgatttgttcgataccatcgaaagctccgccgcaaatgaacaaaatatttgttgtgtcaatttgaatgaattcttgatgaggatgcttacgtcccccttgaggcggcacgcttgccactgtaccctcaagaattttaagcaatgcctgctgtacaccctcacctgacacatcacgtgtgatagacgggttttcagattttctagccactttatcgatttcatcaatatagataatgcctttttcggctttttccacatcataatcagcagcttggatgagcttcaagagaatattctctacatcttcacccacgtatccagcttcagtcaaagatgtagcgtctgcaattgcaaacggcacatttaaaatgcgagccaatgtttgcgccagaagggttttaccgcttcccgtagggccgattaatgaaatattactttttgagagctcaacatcatcaactttgctgttagagttaatgcgcttatagtggttatacacagcaacagcaagtgatttcttcgcttgatcttggccgatgacatattcattcaaaatttcgcgaatttcctgaggctttggtacgtctttaaattctacttcttcttctgttccgagttcttcctctacaatttcagtgcagagttcgatacattcgtcacatatatatacaccaggtccagctacaagcttacgaacctgatcttgtgtttttccacagaacgagcattttaattgtcctttttcctcgttaaatttaaacattctttcaccccttaatcttgtctcactttttcttttaccggcagagcaaaagaaaatgattcttgaaacgaacgagtatgtattgcattttaccatactttccaaaaagacggtaacaatgtgtttctgacttgcacattctatatgtatgacaaaaaacagccctgcattaactatattgccccaagaaaaagagataactcataattgtacaaaacaaggcacgaatgattcgcgccctgttttattagtactattattatgcaccatattaacggttttctacaagaaaatcaattgctttgcgaacttttaaatcttctttcatcgcgtcagtagaaccgatggcttgtttaatattttcaacaggcatgttgtatgcttcagccattttagtaagctcagcatcaacttcctcatctgatacttcaaggttttccgctttcgcaatcgcctcaagagtcaggttagattttacgcgtttttcagcatcttctttcatttgctctttaagcgcagcttcatcttggcctgagaattgagtgtaaagctcaaggttcatgccttgcatttgcagacgctgttcgaattctttcagcatgcggtcaagctcagtgtcgaccattgcttgcggaacatcgatttcagcattttcagaagctttcagaacaagctcttcacgcaatttagcgtcagcttcgttttcttttgcttcttctaaacgtttctttgttttttcagttaattcagcaagtgtttccacttcttcatcgatatcttttgcgaattcatcgtcaagctcaggaagctctttcgctttgatttcgtgaattttcactttaaacacagctggtttgcctgcaagatcttcagcgtggtactcctcagggaatgtcacttcaacatccttctcagcacctgcttcaaggccaactaattgatcttcgaagccagggatgaatgagccagaacctacttctagagagtagttttcagcttttccgccttcgaaagcttcgccgtcaacgaatccttcgaaatcaagaacaactgtgtttccttcttcaacagcgccttcttcttttacaacaagctcagcttgacgctcttgaagggcttttagttcgttttgaacatcttcgtcagttacagttgtgtcgtctttttcaatgcccaggcctttgtattcgccaagcttcacttcaggttttactgttactttcgcagtgaagattaagctttcgcctttttcgattttttcaacatcgatttcaggacggtctacaggctcgattccagcttcttcaaccgctttagggtattctacaggaagaagaatatccaaagcatcttggtaaagagcttctacgccaaagcgctgttcgaataatccgcgaggaattttacctttacggaatccaggaattgaaacttgttttactacttttttaaatgcatcatcaagtgctgttttaaacgtttcagcatcaacttcaaccgttaaaacgccttcgttgccttcttgtttttcccattttacagacatgtgtttccctccaaaaatctattcaggttgtgtcggtcttccattctaaagcaatcattcggcttcgtccaacaaaaacaaagctgccaaagatcagaatcattatgtatagatgttaataatgaactgcaaagcctgtccaaccgtatttcttataacccgttatacacaaatacaaccactatattataacataacacatagcgctttcaactatatggcgcgatttacaaataagaaatttcttcaatatcttttaacattgtgcaagcttcatcgagttctctgtcggtaaattcatacatcatatgaagttcttctctttcaatttcaattccgtgcatctcgtaaccgactttatgcagggcagccgcccaaaggtcagccgacagcaatttcggctggaacggatataaaacgtacaaatgtcttctccacaattcttctactgccgcgtataaggttggattttcatttccaagtgtttcatccagcaccctgagaacacggtgcagaatcggcgcggcatcaggcggaacaatctcagacggttcaattgtcaacgactcgccaaatttactaatgtgtacaggtttactgtactcatgctcagctaacagcatgacaatcatcgttttgataatcggatgggctgaggggtcttggaggattgttttgagcaatcctgtatactttgctacgttacggtcttttaaggaatggatgagattcatttgctcctcagggcttgccagcactttctcggtgtcaattgtatcctcatattcttcggcccaagcctcgtcctcacgatctggatcggtcattttccggctgaaatccagcagcttataaaattgctcggcgctttctgccggcagctgattttcttccaaaacggcttcaatggtgcttttgacttcttcgtattttttgagctgaattaagatggtcatgtacacctgcaaaaccgtaaaataatggccataaccttctttgagcatcttctcgcacacgctttctgcctcttccagctcgcccagctctaaaaagcagatggccatccctaagtgaagatcggattcagtatcatcatatttcatcgcttctgaaaacagttcaagcgcttcttgatactttttttccttgagtgatgacatccctttttccacaaggcggtctttcagatgaggaaaaggaataatttttgcgtttttcttgtcatgcgtcatacctatattcctttcaggcatttattttgttcaagtgtatcaacacctgtgaacaaacacaagaaatgaaaggtttcaccaggcaaaaaaagccgccggacaaataccggccgctttttcagtcttgaagccaagagcttctttgtgattcaaattgcttgatttcatcttccagcagcagcgttaatgaaatttcatcatatccgttgatcagcatctctttccaatgcgggtcaacttcaaatgaaatttgattgccttcactgtcatgaatcagctgattttcaaggtcaacagtcatttgcaatgacttgttttcatactggccgacaagctgtttccaattgtcatatggcatgcggatcggaagcatgccgtttttaaagcagttctgatgaaaaatatcagcaaatgacggcgcaatgataattttaaacccataatcatcaagtgcccacggagcgtgttcacgcgatgacccgcagccgaagttttctcctgctattaaaatggaagctccttgataaacaggctggtttaattcaaattcagggttcggttcaccattcgcatcatatctccagtcaaagaatgcaaaacgcccgtagcctgttctttcaatcctcttcaaaaattgcttaggaataatctggtctgtatccacattgatccgatttaatacggctgctttccccgtatgtgatttcaaaggttccatctcgcgcactccttacacaactgttttttcctgataaaactttctgacatcaacgaagtgtccgtgaatggcagccatcgcagccattgccgggctgacgagatgtgttcttgcaccttttccttgtctgccctcgaagttgcggttagaggttgatgcacagcgctctccctcaggaacaacatcattattcatactcaaacacatgctgcagcctgactctctccattcaaatccagcttccaagaaaatctggtcaagcccttctttttcagcctgaagcttcacgctttgagatccgggcacgacgatggcccttacgctgtcagctaccttcttccctttgatcatatcagcagcctgtcgaaggtcagtcatgcgggaattcgtgcaggaaccgataaatacgtgctccactttaatgtcttcaattttttggtgaggagtcagtcccatatattcataagcgcgaatcgcttcttttttatcatcttctgcagaaaagctttccggcgcaggaacttcagaatcgacaggaagaaccattcccgggttaatgccccatgtcaccataggggaaattttgttgccgtcaaggaagatagatttatcataaacagcgcccgggtctgtgcgcagcgccctccattcctctacggccttgtcaaattcttcgccttttggcgtgtacttgcggtttttgcaatattcaaacgtcacctcgtcaggtgcaatcaaacctgctcttgctcctgcttcaattgacatgttacaaacagtcattcgttcatccatcgtcatatttctgaatacttccccagtgtattcaatgacgtagcctgtgccgaatttcacaccgtatttgccgatgacagaaaggatgacatcctttgccgttacccctttttgaagcgttccatctacgcgcacttcaagtgtttttggacgctgctgccaaagtgtctgtgtggaaaggacatgttcaacttcactcgtcccgattccaaatgcaagagcgccgaaagcgccatgtgttgatgtatgactgtcaccgcacacaatcgttttccctggaagcgttaagcccagttcagggccgacgacatggacaatcccttgatccacactgtgaagatcggcaaggcgcacgccaaattcctcacagtttctttcaagcgccgttacttggcgtttcgcaacttcatcctttatctcaaaacgattgacagtcgggatgttgtggtccattgtcgcaaatgtattttggggtcttctgacctttcttcccttttgtctcaaaccttcaaatgcctgaggagacgtcacctcatgaatgaggtgcaaatcaatatagagaagatccggctttccctcaccatgttttacaatatgctgatcccaaatcttttcgatgattgttcgaggcatcatcttttatttcctccctctacctagagctaagaccgcttaacgtaagctgtcacacattagaaattgtattttcactcatgattgctgccttaacttcctctgtaatggcctgagtgctgctgaactcttcaccccgtgccaaatcttttgttcttttcccagaagccaagactttgtttaccgcatcttctacagctttcgcttcctcttcaagcccgaaagatgttctcaaaagcattgccgctgacaatatggctgcgaacggatttgccatccctttaccggcaatatcaggcgcggagccatgaacaggttcaaacagatgaagaccagagcttgataggctggctgacgggagcattccgagcgagcctgtaagcatggacgcttcatcgcttaaaatatcaccgaacatattttcagtcaccacgacatcaaattgattcggtgcataaattagctgcatggccgcgttatccacaagcatgtgctcaagcttcacatcaggaaactcttgtgcaacgtcctcagccacttcacgccacagccggcttgattcaagaacattcgctttatctacagaggtcactttgccttttctggctgccgccattttgaagccctctctgatcactcgttcaatttccgttctcttataaaacagtgtatctactgcttcctgctcaccttcagtgtttacataacgtttgctcggctggccgaaatacaagccgcctgtgagctcacgaacgataacgaaatcaacattatctatatattcttttttcaaaggcgaagcgtcagaaaggctttcaaataccttcacaggccgcaaattcgcaaacaaatcaagctgttttctgatgctgagcagccctttttccggtctcagttccgaaggattttgatcccatttcggtccgccgacagcgccaagcaatatcgcgtctgcatttttacaagcagcaacggtttcctccgggagggggttatgatgttcatcaatagccgcccctccaatcaggccatattcaaattcaaattcatggttaaagcgttcggcaacacttttcagtacgtctgtcgctgattctaatacttcagggccgatcccgtctccgggcaatagagcaatacgtttcttcaagttaaccgttctcctttcttttatgatccgacagctgtgtggtttttcaatccgctcatattcgactggaaaaccaattgacggttgactgcgttcaaataggctttcgctgatgcttctaatacgtcttgcgctatgccccgacctgctgattcttttccgttcaccaaaactcttacatacacctgggcaaatgcatcttcgccttttctgttagactgaatgcggtagtctaagagctccacgtccttatcgatgcagcgctcaagcgtattgtagattgcttccacacttccagctccagttgcagcttcctgaataagctctgcgttttcttgatttttcaacgaaagagtagccgtagggacctgacttgttccgtaatgtacttgcagagaaagaaattcatacccaatcttgcgatctgttactttttcttctaaaataagagaaacaagatcctcatcagtgatttcttttttcttctcagtcaactctttgaacatcgtaaagaatttattaatctcttcactgtcaaattggaatcctaaagcagtcagccggtctttaaatgcgtggcgtccggaatgtttacctaggacaagcgcatctgcggttacgccgacaagctccggtgaaataatttcataagtcgatttttcctttaaaaagccgtcctgatggatgcctgattcatgagcaaatgcattatctccaacaaccgctttgttgcgcgggacagccatgcctgtcagtttgcttactaaatcacttgttctcttaatctcgttcagtgtaatacctgtttcgacttggtagaaatcttttctggtatgaagggctacagcaatttcctctaatgccgcgtttccggctctttcaccgatcccgttcacagcgcattcgatttgatcagcgccattttcaatcgcagcaagagagtttgcgactgccattcccaaatcatcatgacagtgggctgaaagctttgctttgtgaatgttcggaacgttttctttcatatatttaaagatatttccgtattccgccggggccaggtagccgacagtgtccggaagattgataacactggcgcctgcgtcaatcactttttcgacgatttctgctagaaacggcagttcagtgcggcaggcatcttcagctgaccattgcacaatcggaaaacgttcttttgcgtatttcaccatttcaaccgctctttcaatgacttgctcacgtgtcattttcagcttgtgcttcaaatgaatgtccgatgtggcgataaaaacatgaattctcgggtgagaaccttcttttaacgcttcccaagcagcatcaatatcaccttttacacaacgggccagaccagttactgaacaatttttaatggttcttgcgatttcctgaacagctaaaaagtcacctcgggacgaagcgggaaatcccgcttcaatgatatctgccccgagtctttcgagctgcttagctatggcaagtttctcctgtgtattcaagttcactccaggggactgttcaccatcacgaagcgtcgtatcgaaaaaattaattttgcgcaacggagaccaccgcttccttcttcttgccttgtttcacaaacggcatcatttcacgaagctttcttcccactacttcgatttgatgttcgttctcgcttgcattgatagcattgaaacgaggacggtttacttggttttcgacgatccactcttttgcgaatgtaccgttttggatatcttttaatacttctttcatagattcttttactttagcgtccacaacgcgaggacctgatacgaaatctccccactgtgctgtgtcagagattgaatatctcattcctgcaagtccttcttcgtacataaggtctacgattaatttcagctcatgaaggcactcgaagtatgcaagttcaggctgataacctgcttcagttaatgtttcaaatccggctttgacaagcgcgcttaatccgccgcaaagaactgcttgctcaccgaacaaatctgtttctgtttcttctttaaatgtcgtttctaatacgcccgctcttgcgccgccgattcctttagcataagcgagggctttgtctcttgcttctccagtcacatcttgatagattgcgaacaatgccggtacgccagctccttgctcatatgttcttcttaccaagtgtcccgggcctttaggggccactaagaatacatctacatccgccggaggaacaatttgatggaaatgcacgttaaatccatgagcaaatactaatgattttcctgctgtcaattcatctttgatttcagcttcgtatactttttgctgttgctcatccggaagcagaaccatgatgatttcggcttgggctgccgcttcttttactgaaaatactttatgtccgtcttcttgggcttgagtgaaagattttccttgtctaacaccgacgatcacgtctactccgctttctttaaggttcagggcatgtgcgtggccttgcgaaccgtacccgataaccgctactgtttttccagccaatacgttctctttgatatcaccgttataatatacttttaccattttaatctctcccttgttatgttttatacaatagatattgttttattggatgacgccttttgctgggttcccctcgcaaaagccgttgtacctgttctcgcgatttctttaatgccataaggttttaataactcaataagcgcttcaattttgttagattcacccgtcacctgaacaacgatgctgtctctgctgacatcaacgacagaggctctaaacggttctatgattccattaatctctgttctcgttgaaggtgcggagacaaccttgattaaggccagctccctctggacaatcgattgatttgtgatgtccgtgactttcagcacatcaatctgtttgttgagctgtttcgttaactgttcaacatcattttctccttcaacgtgaacgacgaaggtgattctggaaacgccggctgtttctgtgtgcccaactgtaatgctttcaatgttgtaatgcctttttgtgaatagaccggtgatccggtttaacaccccggagcggttcaccacagtcaatgtgataattcttttcaaggtttcacccccaccatttcatgcagccctttccccggagccaccatcgggaatactttttcttcgctggcaacccgcacatcaatgacaacaggttctcttgatgttaatgcctcttccagcttttcctttgcttccgcttctgatgaaattctgatgcctttaatgccgtatgcttcggacaatttgacgaagtcaggctgagaagcgaatttagattctgaataacgttcttcatagaaaatttcctgccactgtctgaccattccgagacaagcgttatttaaaatcactaccttgaccggaagatttaattcgcgaataacatcgagttcttggagcgtcatttggaatccgccgtctccgacaaccgcgacaacagtagcatctttttcggccagctgtgcgccgatcgccgccggaagaccgaatcccatcgttccaagtccgcctgacgtgacccatttatctgctttttggaacggataaaattgcgctgaccacatttgatgctggcctacatctgttgcgacaatggcctctccttttgtaaattgatgaatatattcaatcaatttctgaggtttaaaaccttcttcttcattatctacataccagagcggatactcttctttccattcagcgagctgttttttccattcgcttgaatcgctttgtttgccgtcttgtttgatcagctcctgcaggacaattttgctgtctccgactacaggaatctgtgttttcatgatttttccgatttcagctggatcaatatcgatgtgggctatctttgcgtttctggcaaagtgtttcaggtttcctgtgacacggtcatcaaaacgggcgccgatactgattaatagatcacattcatgaagggccatattggctgtataagtaccgtgcattcccgccatccctagaaaaagcggatggtcagccgggaagcctccgagccccaaaagggtgtgtgccacagggatttgctgctgttcggcataattttttaattcttctgacgcttttccgtgcagtacgcccgcacccgccaggatcaccggttttttcgcactgctcacggcttccacaagcttgcggatctgcaaataattcggctctgttgtcggctggtatcccgggagattcatctcatgatcgtagctgaattctccttcaattgttgctacatctttcggaatatcaatcaatacaggtccgggtcttccagttgttgcaatatggaacgcttctttaatgatgcgcggcagatcttccggctggcgaacctggtagctgtgttttgttactggcatcgtaatccctaaaatgtctgcttcctgaaatgcatcgctcccgattacagaggttgctacctgccctgtaaagacgactaacggcaatgaatcaatcatggcatcagcaaggcctgtaacaaggtttgtcgctcccggccctgacgtggcaatgacgacacccggttttccggagacccttgcgtatccctccgctgcatgaattgctccttgttcgtgacggggaaggatatgtaccaaccctgaattgtatagcttatcgtaaatcggaagcacagccccgcccggataaccgaagatcatttctactttctctttttttaatgattcaatcagcattaatgctccgctcatcgtctgtgtacattcggcagatgctgaatccacctgtacattagtccccattttagttcctccttttggattttcatcctttaaagatcatcttttcattagctatatagctgattattcaataaaaaaagcccttccgcccacaatcagccgcgcagtaactgcgatagctaaaaggggcgaaaaggcttttctttccgcggtaccacccttgtttacggcctgttaatcggccgtctcatggatatttctatccgctttagtaacgagtgaatcaagttcacccggccaagtcctactgtcatttcagactggcactctgaggcgagttcaccttgtaaagcttcgccggttctcagctaacccggttctctgtggaaagctttttcaaggctacttatcctcatctgcgcttttcatattcagccttcggaacggttttccagctgttcaagaaggtcgtttgtttttcactttttagaatcatactgcgatgattttcgcttgtgaagcttgcgtttatcttttgttgaactcatattacgccgctttggacgcagtgtcaacagcattttttaaaattattagacaattttgattaatcaatctatattgtatacgctttcattattggtacaaaaggaattgcaaatgttaaaagtttttataatttttttattaatctatcaagaataaaccagaattatttaattttatataaacatgtaagattttataacacgctatggttcgtatatggattgagtctgacagatcatcttgcaatccatttcaatttcggataggcacccctattattcctcggcatacattaatggtatcttgcaaagaaaaggtgatacgatgaataaatcatttgcagacatgcaaggatttcctgcgggctttccaagcttccccaactttccgcagcagtattatcctgctacccctgccttctaccagcaaagccagcagccatttggaggctacggatacggacagccgttcagtcaggcatacagcccgttaaccactccctctggaatgtactcctcattcccatacgcttcagggttttacggacagcaattttcaggtgcaggctttagcggccatggcggcagcttaagtgctccagcgatacatgccggcggattcagcggggcgccaggcgtacacggaggctttagatattaaagaagaccacaagggccgaacatctattgcggtccttttattgttttaaaacgacttcacaaatacagtcacattttctgtctttatatttggaaacaggatggaatatgattagatgaattgaacgatattctgcacaatccgtaagttttcgaggaggaataaaattgcatataaaaatagacgatttaactggacgtcaggtggtttcactggtgaatgagcatttacatagcatgacgcttatgtccccgccagaaagcattcatgccttaggtttagaaaaactaagagggcctgaaataacattttggagcgcatgggaaggtgatgaactagctggctgcggagcgctaaaagaactggacacccggcatggagaaatcaaatcaatgcgaacatctgcatcacatttaagaaaaggcgttgccaaacaagttctccagcacatcattgaagaagccgagaagcgaggctatgagcggttaagcttagaaacgggttcaatggcttcatttgagccggcaagaaaattgtatgaaagcttcgtttttcagtactgtgaaccgtttgcagactacagtgaagatccaaacagtgtgtttatgactaaggaaatgtgagacgattttataaggatagataagtgcaggggaaggtctgtcttatctatctttttttatattcacacatttttcacctttatgatacacgccaatgttttcaattttgtttaattcaaagaacagcgggaattacaaacgacatgaacgatatcatgcaaattcataaaggaggagattgatatgaaaagcatagttggtgtatatgaaactccgcaggaaaccatcgcagcgattgaaggcttactcacaaaaggctatgattctgatgacatttctgttgtgacaagccggcgagatacagattatttggagtcacgtacaggaacagaagtcaatcaagccatcgatgcacatcaggacgaatctgaatcttttttcgataaactgaaagattatttcacaatggatgatacttctacacacagcaaagcattatccgacttggatattaaaactgatgaaatagacaagtatcaagaagatttggatgacggaaaacttctggtagccgtcgatacagatgcaaatgtaaatgctcctattgataacggcaatgccctttcaggcggcttttcaagcacaaatgaattggattatacaacgaaagaagaaaaaacgatgccgctccgggaagaacagctgaaggtcgataaggaagacgttcaaaccggcgaagtagaaataggaaaagaagtgaaaacagaaaaaagagatatggacattccggtgagacatgatgaaatttatgtcgaacgccgtccagtggatgaaaataaaacggacgctgctcccgtcaacgattcggaagagatcagagttccaatcgttgaggaaaagctggaagtgactaaaaaaccggttgtcactgatgaagtggttgtcggcaaacgcactgttgaagaaaatgaacatatttctgaaactgtgaaaaaagaagaacctcgtctgaataaagaaggaaaagttgacggcttggatgatgatccgttaaataacaaatgaaaatcataagacgacaacaaaaacctcaaatccatttaggatttgaggtttttcttttggtacgtcccaggagagattcgaactcccgaccgacggcttagaaggccgttgctctatccagctgagctactgggacacgttttgtttttcgctttaactatcagcgacaagatttattatatatgggatgcaataataagtcaacggttttttagaatttttttcatgaggaagaaaattttcttcctcatgacattttcatagtgtgactcggttttgcagatcctcaatttcattgcctgcttggtcgtaaaaacggactgtcgcagcatcattttctaatgtcagtatagcatagctttctgtcctgcgcaccctcggaagccggatgctacctgggttaatcatcagttttccgcgcagcacttcgcttcccgcgatgtgcgaatgcccgaagcagataacatccgctccgagctcctctgcacgatagtatacgtttaacaaggtctgttttataccgtgaaggtggccgtgtgtgaccagtatttttcttgagccggcattcagaagaagctcgtccttaaaatcgccggcaaaatcgcaattgccttttacaaccgcataaggctccaatgcaggatgcctcgtttcaagctcagagtccccgcaatgaatcatgagatcaacttctgcctcatgccgtttcgcaatggtttggagttcttcttcaagcccatggctgtcactgataatcagcacgttcatgtacaagcttcctccttatgcctccaaaagcttagacagctttttaagcgcgtcagccctatggctgattttatttttttcatcacttgtcagttcagccattgtcttatctttatctttcacgataaagattgggtcatagccaaagccatattctcctctcggttcttcggcaatatacccttcaacatggccttcgactgtttttgtttcctctccgggaatactcacggccagtgcgcagcggaaacgggcggtgcgctgttctttttcgatacctttcagctcgctgagcactttttcgatatttgcctggtcgtctttctgttcccctgcatagcgggctgaataaaccccgggtctgccgccaagattatcgatggatagaccggagtcgtccgcaatcaccattttgttcactgctttggcaacagcttccgctttcagaatggcattttcttcaaatgtatggcctgtttcttcaatttcttctgtgaatccaatttcagctaaagatttgacatcatagcctcttggctcaagaatttctttgaattccttcacttttcccggattatgtgtcgcaataattgcttctttcatgatgatcaagcctttctgtctttatttcagttctggcagagaatcacccagcacttctttttgcttgtcaatcagctcttgaattcctttttccgcaagacccagaagaccgttcagatcctctcttgaaaaagtcgcctcttccccggttccctgcagttccacaaaacggccgctgcctgtcatgatgacattcatgtcaacttcagccgaggaatcttcttcataatttaaatctaacaaaattccctgttccttatcaattccaacagagattgcagcaagaaaatcagtgatcggatttgtcttgattgttcctgctttgatcagcttgccaatcgcaatcgccatagcaagaaatgcgcctgtaatggaagctgttctagttcctccatcagcttgaataacatcacagtcaatccaaatcgtccgttcaccgagcttttccagatctacaacagctcgaagcgcgcggccgatcaggcgttggatctccattgttctgccggaaattttccccttagaagattctctgattgttctttggtttgttgcccgcggcagcatgctgtactctgctgtaatccagcctttccctccgccccgcaaaaacggcggtacgcggtcctcaacagacgcgttgcagattacctttgtattccctgctgttattagaacagaaccttccggatggctgataaaatccaaatcgaatgtgattggacgcagctcatcgtgttgtcttccgtcatgtctcatgttttacctccgattgtatgtacataaaccatttttgtcccggaattgaataaagaaagaggcagccggaacgctaacctctttctttctagtatatcaaaaatcccaatttaaaaactacccgtattcacttgagatggtctggagaccggttctgtgagcttttcgcctttttcatttacaagctctgattttccgttcactttaacagagacgctttttacatccggctgctccgttaacgtcagcacaatgctgttcagcacttctgaagaaatcattttcgtcttctcatcggcgctgccgaatatagattgattgaaatccaacgtcacgcgcccgtctttgattttcggtttgctgaccagctttacatcttcactgaagtctgttaacagcccgctcaccttgcttggccctttagccaattcattgatggctgccgtgatgtcgtctttttccgaattgtcgattcgtttggtcaccggcacgtagtattcactgtcttcgttttccgccaagtagtagactgtcagcggatgggtagcagtgagatcatttacaccggctgtttccaaattaatgccgtctttgcggcttaaatcatctgagatcggcgtccctcctacaggcatctccttcagttcatgcccgtttattctcagcttcactttatctatcgaactaaattgcgtcagtgtccacgtcacagattgaacgattttctgttcgtcttctttcttataatttttgaactcattagagaaatcagctatcgcggttccatcttttttgatgtcaacgttaacggtggtgtcagccggcaatacagctctgaagccattcggaagaatttcagacacaggcccgccctgtacgaggtattcaagcgcctgcttagccgtgctctcacttttagggagaggcagcgtttgcgcaacaacatatccgtttttatcaatgagataaagctccctcataacagtagatgaggcttgatccgcttttgcggtatcgcttttttcactttctgtttttttggctgctgttgtatttgaattggcacccgcttcatcgttcacgaatgtaacgtcttgaggcggatcaatttcctcggctgccttatcagattgaaacaaaccgcatccggataaaagcaaggcagaggtgagacaagtggcaccaatgactgcaggtccttttttcagcatacttttccctcctaaggatgtttgtactattatgtatacgagcctctttaggaaatagaccgaagaattccggcaaaacagaaaaaaacccgcaacataccgttgcggggaaaactatcttttaatcggttcttgcagtgagatacattccacatgcccgacttcatggccaaaccaatcgtctgcgatttttgcaaactgatcacgcgcccctgttgtcaggaactgatgatccggggcaatcggagactggttcagcagccctttataagagagaattgtgctgacttcccgggctgtttcatcgccggacgaaataatgtttacgtgctctcccatatatctttgaatggcttcttttaaaatagggtaatgggtgcagcctaaaatcagcgaatcaattgatgtgtcttttaacggatacagcgaggttttaacaatctcgtctgctgttttgtcgagaaacttcccgctttccacaaaaggcacaagcagcgggcaggcaaggttttcaaccttcaaatcagggtttaatgccaaaagcgcttcttcgtatgcattgctcttaatcgtattctctgtgccgatgacaccgatatgctgattatccgtcacttttatcgctgctctcgcaccaggctggatgactccgaccaccggtataccgacgctgcgctggatgtcatccaatgcgatcgctgttgctgtattacaggcgatcacgagcattttgatgtggtggttttcgagtaaataattcgtcagctcccacgtatattgaagcacctcttcttcagggcgcggcccataaggacaccgtttcgtatccccgacgtagataatattttctttaggtagctgtctcatgatttccttcgcaacggttaaaccgccaaccccggaatcaatgactcctattggttgttccaacaaaatcgcctcattttctcttcatttcatgctgcagtttcatcaaagatttttcgaagatggctatttcttcatctgtaaacgattcgaacatatcacgcagatattcctgtctttttgtaatgacctcttggataatccgttctccttcaggcagcagatgtatcctgacaacacgtctgtccgccgggtccttgacccgctcaacaagctcatttttttgcatgcggtcgattaagtccgttgtcgtgctgcatgccagatacattttgcccgataattcaccgattgtcatatctcctaattcataaagccattgcaagccgacaaattgcggcggcgtaatcgcatattggttaaggatttctcgtcctttttgcttaatgatcgcggcaatgtggcggagtgacttttcaatatccgcaacatgctccaaaggttttgatgtcatttgtccatccctcactcaaggatctcttacgcacaaaagcgttccgtgtctattttccttcttttttgaagaaaatgcaagactcgcaggagagaaatagaggactttagtcaaacaacatcaagaaataaaatttaatttatgacttgcctacgttttgcacagcattccaaatatggtttcgaatgttccaaacaaacagcaataaccggctccttccaaaagaaggaataccggcaaggattaaagctctagctcacccattctaagaagctcaacaacggcttgcgaacgccctttcacacccaatttctgcatggcatttgatatgcatatctatcgcaaactaaaacaataataatcacttgaatttataatggaaatcgactgttccatcctcgtatattacaagtttatcaataagcgctgaaaatgcttcgaataaatcctgatcagttctttccagctgtgcgaatgcattcttaatatttgatatgtcgattgtttcttcttcctcacgctcaagcatgaacagcttatcgttcagtttttcaatttgttcttcaagctcttttcgcttcgcctggaattccgccttagtgatcaactgatcttccaagtacaattcgattagacgttttttcttgttttctgcgttttcaatttctattttcgttcgcttgatccggtttttcttctgctcttcaaaatcagattttacatccagttttaacttcttgcccttttgtttcagtgttttaataacaaaagcccgcaagtccttatattgcatcggagcatggtttacacaaagagcagttccacctcgtctgtaggcgctacacttcaaataattaaactctttcttctcacgtttctgattgtatttgtacgacggtagcacaaccatattgcaaccgcacacaccacatttcatcattcctcgtagctcattccgagggttaaaacgctttttacgcatcttgtgttctttgttattagctttctcatactcttcttctgatatgatcttaggacaccagtctttgtaaacagtccatttttcttttgggttgcggataaattttttccgtccccctattttgacttgagtatgtctattggcaataaacacgccacaataaataggattctttaaaatcgtttgtactgtagacagctgccaaaactcagtcttttgaggctttacaatgtttccgagtgccaattcttcgttgagcttgagaacgattcttttatgtccatacccatgattattatgaagatcgaaaataaaacgaacgacttttgcttcttcttcattgatagctaggaatttaccttctttcttaaatccaaaaggtacacggccggaatgttcaccacggcgagcttttgctgctagtgccccgctggctgccactgaaattgtttgaggatattgggcagcaaacattgaaaacatttcaaatttcattgagtttttgccttcatatagactatcgtacccctcttcgagcgtcacaactcttacaccgtgggccaataaaacctctcgaatttcaagggcatctttaagatcacgagcaagccggctgattgatttaaaaacaaccatcttcagctttcttttttgcgccttatctaaaatgagttgcatcgcttttcgatcaagcagcactgtcccgcttatcccatcatctaattggattgcttcatctttccattcgtaattatttttctcaatccaatgatgacaaatatcaatttggttggctattgatgtcacctgttcatctttttctgaggaaacccgtgcgtaaactgcataagggtaatcttcatatttgatgatctcctgtgtttctgtctctttgaagaacactaaaccaccccattattttgcatttggtacattttagtgtgattatagcataatgattacgaacctcctatacttttccggttgattttcgaacatttgttcttgtataatttgttcaaggagttgatcagaatgaacgagggtatttatgataaaagatgggaacaaaaatttattttgcctgagcaaaggacagcgctattaaataggaagaaacaagtccaaaaaattgaaaaacccatcttagatgaataccaattggaagatatggcccgtgttatttgcgaggcgatggaattcaactcggttctggtcatcggtgtatacagagacggttttatcgaagaagtaaaaggacatgtccattacatagatgaagtaaaacagaggctgcacgtgaaggatttaaaaggtgatacaaattttattgcatttggttcagttctttcagtagagcaaaaataaaaagaaccagccacataataagctggtccttatctttaattaaagaaatggttatgtaaagctttagaaaatccaaaaccttcttctggtccctttaaccagagagaaataaacttttcgaaatctacttctttttcaatatctttcaaaattcttttaaattcttcagtaaagttatgaagagagacctcttcgccatttttaagtttatcagtgtactggctcgttaactctcttaatccttgatactgtttttcacttaaatcataagccaaaacttgatcaaataagccaaaccgatcataatcagctgctaattgttggactaaccttagttgaaaagcctgtttctcgacttttttttctaggttgtcaagcctttcttctactgttaccaattcaaatcacctcaattaaaaagctaagaaagtaaatacacttgcaatagttctagctgtagaagattttacaccagcatcaattagatatgaggaaacagtgtcaataattgcgtcctccacaacgtcacctcgtttaactaactcgtccaaagcatctgctacatcatcagtatgttttgcgaaggtttttcctgctgatccacctaactcatcgactacctcaccaacaattctcccaccatgtcgaagcgcactggctgttgccttcattgcttctttagcaatccattttttaataccatttgtgtgaaattcaccagattgttcagttgtattagttgataattcggatagtttagcaggagtttgataagtgacttcttgctgtgcctgtaatgttacctcttgagctttggcatgtccatccaacggaagaactaatgataaagagaaagttaatgcggatgttgctaaaagtaatttcttaaacatgaaatcaatccctttcttttaaattatttacatgtaaatgatagcattatatttcgactagaaaaataatgctttttactcaaatattagaataattttgaactatctgtaacaaaataaacaaaagtatctcctcgagaaagatactcaaggagactatttatttacttcaagagcgcttctagtttcgctttcgtatctggtccatatataccgtcttgaggaagcccgtacattgactggaaccttctaacggcatcagctgttttcggtccataataactatctatcccgaagtttttagcttttttatccggatagaaatgcaatgccgccagcgctgtttgaatctgttcaacagcatcactgtgcatcaatgggctcttcactttgaaaatgccagaaggcagattgaaagatgatttctttttgcttgagcttggttttttcactgccttggacgaagttgttttcttgctggatgatttgccgccaagtgcttttaattcagcatcaatagccgctttaacctcattccagcgtccctcgtctaaaatacggtgagggcaatactttccgctccaatcttggtgcttccgcactcgatcaataccccatccgcgttctttaagcagctgagcaacaaacttgatagccaacttttcagcagccctgtatttaggccctcctgacttgctgtagcagatttcaacgccaatagacttacggttcccggtaccgtttgttccgtctcctgtatgccatgcattgcgatctgttgggatgccctgccttacctctttatcatcaacagcaaagtgaaagctcgttgaacttgtgtttccgatcatatagctgacctcgttagcagcagatgcatcattgtaagtgttatgaatggtgatgtattccgcggtcatcggattagggcattttaaagcgtattttgcttctgatacaaggttctttttcactgcgattgtcataaatgatctctcctattctgcttttgaattagaaagagccgccagctggcagctcacttggttagattgtgatttttcaggacagctttttgctgatggccttttgcagtcacatagttgtttttgaaccatgctgtaaatgtcgtgccaatagtaaaggctatagagcccgcagtgtacagcgcatccgcaagctgattcacctgatcctccgtaatatccaaaggtgatttgccaagcatcagcattgtttggttgataagtgcaatcaaaagaagcaccgtccgaatgaccgtgcctttgtcaaagtttttcatattgtgttttcctccttatttttgcaaaacagtataaaaaatagcgattgcgccgccaataacgccagtgcatatcgctgtaatgatagcgccagttattgtgcgtttgatccaagttgtattctcttcgatcttgttgagtttttcgtttaatgtcatgatttgctggtcttgtctatcagaaacgcgttcaagaacatttacacgctgttcaatcgttttctggcctgccttcatttccattatctctttttgtaatgcatgcacatctggtacctccgtcacttctgacattagtacgccccccttatatctatttcacgtttttcacctccttagaggcaaaataaaaaagccttattgactggctcctgtcgtttcctcgtatggttgacctgttacttcttggtattggtcatgtgtaatgtattgtgcctgaacaccttctttcaagtcatcaacggaacaatcgttaaatgccatagcctgctttaccatggctgttgtggcccatttgtagaacaacgcaaatacccagaaattaagattcacttgtcattcctccctttaaatagagaacatctaattttaaagatgcaacttgctcacctaaagattgattcaaattttctgcttcttttcttgctagcacttccgcagtcaattgtacgcctaaagcattttgagccagctcagcctgttttcttgccagtttttcgtctgccagctgttgcccaagtgtagccagctgttctgctataggattggtttcaggaatactgccttgtttcagctgctctttgtattcttcatcagcagtttcaacccatgtttgtttttcctcatcgaataaaggccgccacataccctctccatttatttctggaggaatatcagtagcattcgccgggataatatatcttcctgactctctatcggggtgtaactcaaccggccttcctaaatagatcttatcctcaccatatgggtatattaatttcatacttctccctcctttctttaagttagaggcacatctaagtcaatataatatccattcactttagactcagtattagccattacccctgttagtttcatatcaccagatgcatatataataatcttgctgtaaccagtggttccgctagttgcaaccagtttgactatccctttgcttggagcgctagaagacgggatactagcaaatacaatctctctatcagtaagaacatgaccattaagatgcaatgtatttccgactttacggtattgtaaaggtctatcacctgtagttgccccgtttttgtatggaacatttagccacggcgtctctataaagtctaggtctgtaataacctctcgccacccagtgaattctccctctttatgctttgttccaatccatgtacggttatcataggatcttgttgcgacaattttctttaacccttgaggtggagcaaggtcagccggaacatctgtaatatcataatagtaccaggcagcatcatcatcccccggatgattcagaacacctgccccaaaataaaagccagtcggataatcaaaaaggttttgtcctttagttatctttattctctgaccgttttgggttgtcaggggatagagttgtccattattccatttgttcttatcttctttcgttacatgaatgtctgttttattttcatgagtattgacctttgtttgggctcctgctgagtattcgatttccatccaaggcgtccagttatctgatccactcaccttatttcttatgaatttccgccgattatcaggtatagaggttgttgcactggtataagctgtgaattcctgatatggataagtgccgtagttgtaaaccaataaataaccattgctattcacaggggcattcagtgccgttgaagctgaagtcatataataaaaccctgtttcaataacagtattgaaatccacgcctgacaagtttttcatcaaaccattgtcttgtgttaattttgataactgagccgcattccacttggttcgctctgcatcagaaatatgacgaatctggttatagttatgtgcgtcaaactccgttttggttgcctgtttgtcattggtaacattaccgagcccgacttgatcttttgtcaccccatgagggttgcttttatcattaatgtgttgttcagtatacgtttttgcatttttttcggctgtatcagctttgttttgcgcccctgtagtcgtttccttcgcattccaatttgaacgctctgtggctgtgatatggcgtgtggaatctgtattgtgtgcgttgaattctgttttagttgcttgctgcacgttgtctacgtttcctaaacctacttgggcctttgtgacttggttggggttatccctacgcgcagcaaattcatctgtataagcttttgctgtttttaaagcagaggaaacgtcatcctgcgttgccccgatctcttgcaattcctttagtgcatgataggccgtatactgataccagttgaaccaatccgcagggggatgatccattggtttgtatccttcatcaatggaggactgcgggggccgctgcccggcgttcccccattcaggcaattcttttgtaaaaggcataaacatcactccttaaatcggtaaagggtaatcatcttcaggctgaaagattccgccaagtgttcccccatctgtcccgtctgttgaaaatccatattgacttgtttctatagagttagcagaggacgaaaaacgaaaggtgccgtttaaatctacataagccacccgtacgcctgcagcaactgttttttgaacgatattcgaaaactgtgttgcactcattccaactttgctcaaagcctcaatgggtgccttttttacgataatggcagccggttcatcttcattattttccttgctgctgaaaatgtgtatttcacttggcttgcagttcagtgttttggctaaagcttcaatgatccggtttgtggtgccatctgaaacatttctggcaaccttgccgcgaataagcacacgataaatttcatcagtggcacggcccctatcctgcgacacgttgtcaccaagtagatccagagcctttccttttgccgcatcaatatcccgccagttctcagctgtggttagcgcgcttttaagtgctgtcagctgttcatcgacaattaaaaaaagctttccgatattgctcttttcatctttcaaaaaggcatcggtcagctttcctattaagtctttaatcatatgtgattcaccacgatttcatcaaaatgtacctgggcaacctctttaggttcaatttcaatgtttgactgtgaaaggtttgtcgcatctttccccatcctgattgttacatcagagacaccatctacttgatataccgcgttgaacaactgcgacaatataacatcatcgcccatttgtgagccggtatagtaagagccgtttgcatcaattcccccgattttataaacgaggttgtttttgatctgacttactccatcaatagggaaggaagcatttgtttttaaatccagctgcagatatattttgacttcccttgcaaaatcaaatttgacggcatggtcaagtccgctggcgtcagttatggtgacaacttgctccccgaccgtttcaattcctgcagcaacactgtcaaacagtgcttgcgcaacatcatcttttgtaccgcccagaacataagcatgaatgctttttggtgggttgccgtccgcatcggtctgcatggtattgttggcaacaatattcgccgatctgacgcctgacacgcttagcagggctgaaataatacctccgtttgtagatgctgaactgccctcaactgatttctttattcgtgcccggaattccgaatctgtttcctcgtcggcaccgcctgccgatggttccggatttgtaactgaatacacgccctctgagggctctgcctgcacggtaatggtatttgccgcaacattgtttataacgcccttagaaagcgagacagccgtccctgagcctgtcccattagcctcaattacaacatcttcaatcaattcaaaatagatgcctgattccgtagtaaactgagtttgttcttcaattacgatgccgggttctccagtaaaggacagagtcacaactgactccgcagctggctcccgcgtgatacccgagttgctgccaagacgatcgagctgcacgccctcagacttactgacaaagccgctgttataaaccctttctgcaatgtcccacaagccggcaagaaaccaagcaaagatacgaataataattcctaatggtgttttactggatgtgtttacatcctccccgaattgctcccgcgcccggtcctccatactatcaacaagctcggaataggtttgccgttgaaagcctgtttcatcaagcaagatcaacaccccctatctcaattgtttcttcatcctcttttgtcattttcacatgcaccgcaagactgcgagactctttatccattaaaaagttcaccgattccacactggcaatacgctcttcttgagaaatggcatttataatgtcatattgcgcctcttcttgatcaaactgctttcttaaaatgttgctgcgatcaaggccgacatgttcatcaagctcaaactctcctaaacttgttctaaggatcatttctactgattgagccagctcagcatcaccctcaaccatttgtaactcaccattttcaaaacaaagatccccgtctttaagcttgagagttttcatccttcccacactcctatgacaactggatcgtttatactgtgtgtgcgcctcgaatccggatcaaaggttttattgccgtccaggttatccagtgaacgttcagcaaacgaaacaaacacgcaggaccctactttaatatcagcttcgacgtgtttcaaaacaggcgcatgctcgattaaagggtattcatgtagatactcaccatcattggtttgaaacagcaatttcagatcggcagtgtgtttctcagcattgtaatttacaacccgtgctggcgccgttgtatggattgattgttttatccgctgttcgaatccgtcaaagaactttgtcgctttactcattaaatcaccctacattctgtgaaaaagtctttaccgtcaaaggaatgagagccatctttcacacgatattttcctttcgctgtcttgctgtttatttctatgattgaagcaactgcgatacgatgctgcaataggcacttcaccttataccctttgagatcatcttcctcaaattgttcaggcgtttccacaagtcctgttgcctcttcgagcttgaaacgttcgtcatccccttgactgagtggccgaataacaggacggccgcgccgataatacatgactgccccagcatcatgaatgacctcttcaagattgttttcaatcaatccggtgacacgatagccttttttataaactttatttttaggcagaatgatatttttcacttttataccgagcacacgcagaagcttatcgacaatttgccttgaggttgtgccagccttgaacgtgattttcatgtatctcttacggtatctgacctctgtccgagtgccataatttcggaccgttttatatgtccggccgttcttatctttttttacagtcaccactggttttgcgagcttgtaccgctttttcacatagtatttttcagcaggatcagcgttttcagtggttactttcatatgggtgtaatcatcgccatcttttgaatagatggccgttaccttattcaaaccgtcccaattattcagcaccttggtaactttaccgatagttaaaacaccgtaatcgtctttataaccagcttgaacagtgatagtgctgccttttttaattttgctgattgaatctttgctcaggttgtatatttcaacctttgtttcattcggtttaaagtcatcatcaaacgggacctcaaaatgaatctctaagtctttataatcgaaagtggtttgtgaactgccgttatctatcgtgaccttaacgacgcgcccaaacagcattttattcgtcgccatcgtcttctccctccgcatcgtccgagacatcatcaatataaagaaacacggtttgcataaaattctcgtatgtaacccgtgtttctgtattcgattcatccatagggataagggaaggcgcaggcagtttctcgtttacaatgtcttcccacaaagggacgttcaaaatcaatttttcgcccagcacgattgattccatgtcttgatcatataaatcaagtgaaaaactatcgtctgtttggttgtaattgatacgcaaaatgaacgtgtcatctgctaaatcaaattcaaactgctgtggtatgtcctctttgtcaaaaggaatgtaatctcttgatgccatgcctttccctccttcatctaatcctcattttgacccctatcggaattcttcggtccggccagggattcaaccgacgcaaagcatttactgtggtgccgtatttacgagcgcagccccaataagtgtcacccttcttgaccttgtggtataacttgccggatttttttgttttcttcttgctggctttcttctttttcccggctgttttcactttctttttgacccacgggctttttgcaatacggatttcttgcaactcaattgaaatagcaaaaccgtttgtgtaatcgcctgtgtcgcgatctatctttgtgatgatcacatttttagcaaccttacgcccggtataagtcaaaagagtgccggcataagcctgctttttcagatattcataatcactatttgctgttttgcctaataaatagccagagactgttgtcgtctctggctttctttgtacatggtccgtgatcggaacccctttttcaacgggatatgaagtgacctccacatccgcgccatcagattccttttcgtttacgagattaatctttccgagcttcgccaattaataagccccctctggtggataaagcgacttcagcatgtcgaaaacttcgtcaaatgtttcagttacagcctttttcacctttgtttctgccccttcactgccgccctcaacttttacgttgatcgacgggttaaaagtgatattgacagatgaactgtttgagcttgtagcagccttttctggtgtgtaaccagtatccgcgccaagctcccgaccgagtgcagcatacattccgagtgattggtttctgtatcgtggctcagttgtgatgacatactccctaaagccgttttcaccaagcgcagcgacttgtgggctgttaatgactccacctgtcgcataacctctatacggcccaccatgagccatagaaacgagcccagggtgttttaaaataccgccgtatctgctgttcaaatagttgatagcagcaaggatctggtcaactggatttttgatatttccgtgacccggttccttgtgagcgttgaatgtacttggtataaactgcataagcccttgtgatggatggccagctttcgcattcgaatcccaattgttcacgacattaggattcccgcctgattccttcatggcaatagtttcaagtgcgccagcatattcagagccaagccccttgattgatagcgcttgagctacccactttttgacggcttttgaaccgccacctgaaaagctttcagcgtaactggacattttgcctttaacaaaaccaacggccttatctttgacaaagttaaaagccccttttgcgatatcaccgaacgagccagccatagaaggtgcagagacacccattttttctaagacttttgttaaaagcttagatgggtgtccgatgtaatcaaaaacatcaagagcaacatctttcactttacctgcaacggattttacaccattccatgcttttgtgaagatatttccttctgtacctttcgcgtaagctggaactcctgataaagcagcccttgtctgtttagcagataacacctgagtgccttttgggaggttcattagtgtatcacttgcagggctgagtcccacatgacctgatggagtacgatacatttcaggaccagcgtttgcccctttaccgtctcccagtatagccgggcctcccgggtgtccgccggttccgtgtgcatacttaggtacaggccattcaggtatatgtttatctttcaaaccgatcttatcaagtacccagttcactccgccgattacaccatttactccttttccgagtgctccggcaagtttgttcgctaagctagtcacaccagacacagctttatgagccatgttcttaattccatcaccgattttacccggaagtttcttggccccttcgactaaatcattgaaacgatccataactttttgacgtaaatcaagcgccaataacgcgactttattttttatataaagccatctatcagtgattgctgaacccatattacttacaagctttttcaccatgccgacagcactagaaaaaatttgcttcactccgtcccacatcatgcggaaattcccagtgaataagcctttgaaaaccttcactattcccataataatgccgattgcaccctgtattatcgcaatgatatttttaagtgcaacttgaattattgagagcacaaccgggaacacagcagtcacgatatttaggatgaaacggatcgccggaatgaccacagttgtaatgatattcgccagaaattgcaaaagagaaacaacaatcggaagtaccgcttgtatgatttgcatgatctgcgggaatacctgctgcacaacttgaatcaaaataggaagtgctgcttgcgccaactgtaaaatgattgttgccgctacagtaagcaattgagccacgattggaagaacagccatgatgacttgtttaataatcgggaacacttgctgcaccgctgataaaattaacggcagcacttgaaccgctatttgtccgatggatgaacctaaaagctgaatcaattgcaaaacaatcggaagagcttgttgtacaatgctcaggatcaacgggaacgcaagctgaatcatttgaaccaaaatcggtaaggcattttgcacaattgaaacaaggattcctgagaaactgcctatcaattgaataatgattggcagcactgcattaattacgctcagaatgactggaaaaatcgtctggaagccttgaacaagtaacggtaggatgctgcttgctatttgcaagacactcgtccataaagtacccgacaactgcatccaagctgaaagcaattgctgaatcagtggcatgatttgcggaccgattgtctggaacgtttgcgagatagctgcagcaaacaaaacaagcgtgccgcctatttgaacgaaagcctgctgaagttgtccggccagctgctgaaactgtggcgtcaattgcgtaaccaattgcccgaaagactgttgaagcgtgttgatgattggctgcaatgcctgaaaaacagtcgttagaacagattgtaccgatgtccatgccgtctttaaggcctggcttacattttggtttgtttgttgcatgcgatacaaggcgccagcaacactcaaaatagcaccgacagccacaccgattggccctgacactccgaggaatgcaagtccgatcgccgcgacaaacggagcaacaagagaaaccatacctttaaagctggatagaccgactttcaactgctccatgaatcctttcacgatgccgtttagaccgtctgatagtcctttaccgaagaagtccgagactgtctttccggcattatgaatgaagcctgacacggttttcacagccgttttataggccgactcaattccagccactaactgtggatgcgattcaccgagacgatcccataatttcaaggattcagcctgcattttatgaatggctgtgatcgccacgttttgtgcgtccttgaatcctttcatgaatgcaggttttaaaccctcagcttctttgatcatggtatggaatgcaccgacaaccgccgatttccccatgtcagcaaagcgtttcatcgcgtctgtagctggcttgaatctttcctgaagcttatcgaaattcttgtacagcaaataaatgccggttacaaggagaacgattgcccccgcaacgacatacaccgtgcccgacatagcagccagcccggttacaactggaccaatgaacatccacaaactgctgagagctccaaggaacccattaactaaccctacccctatcgctagtggcgataaaagtagggttaaaacagggatgagaagcataaatccttggatcattttcgagagtacagggtgcgcctcattaaactgaataatcagcttcgcaacggccgtaatgcccttgtatatcgccatcgcaaacgccgcaaacacttcgattgctggctgaatggctttcagtagtgtgctgcacatctcttcccatgcctttgaatagccgggaactgtttgtgttgctgctttatgaagcccttggaacatgaaaaagtttgtaaaagccgcgcccagtgccaccatttgaaaacgcatataaccctgagtgatcatcattgtcatatcgttaagctctttcatgttggcagtaggtccgagcattttcagagccaaatgcgcagcagttccctgctttgccatgttctcaagcgtattcgatacggcaagcccagctttattgacttgatataatgggtttcccattcggtcatagttcgccgcaatcttctcagattgagtggaccgagccatcaatgtccctacagtctgcagcatgctcatgcgcatcattttgttgtttttcatcatgttgtctgttacttgcttgtgagcacgtcccagcctgtacacttcatccataaactgctgattggtgccagaccagctgtccatctggttccctaactgaaagaaaccatactgggctcggatcaattcattccgaaaaccgttcatgccatatcgttcttcatgccaggcttgacgcatttcattgagcattcgtattgtatcggcttctagtccacgggttgagccgcgcaaaaagtccatttcacggttatactgccggattccccggtagtccggggccgggacagccaccgcagccacgttattctgaacgctttgcgtgttctgctgggtaacgtttgctgcgggcgtaccgatacggctcatatcgacgttattcaaattttgcctgagttgatcaattgattcattggcgtttgttatagacgtttgatcaacattgatattaacctcagacggaaggctttgaataagtctgcttgtctcttgtacctgggtattcagctggctcaaacgggatgtaactaagtcgatttgaggccctagccgttctatcgtttgactggcagtttgcaacgatgagttgtccaagatcatactcatatggatgtctctaaaattccgctgttgcctttgaacctgagccatccgtgtacgcatctgtgaaaaactgccgccagcatcgccgacatgatcaacgagtctatctatttgctgatttgctctttctagaggggaggtatcaacgttcaattcaacgtcaatatgcgtacttcttaatgcttctgacaacgttcataccccctcatttcttgttattcctcttgttttcttgctcaatatggatgtcgagggctgcatttgcctccattagggtatcgagatccatcatcgcgacctctgagaaggagaacttcccagacatcacgagtctatacataggccagttgtcactcgccttctttttgtaatacggctttggtttgggtttcgtcgataagaaaggattgaacctctttcattaattccatgaaaccttcgtgttcatcgaaatattcaaagctcactttcggttggacaacgacttctttcatgaataactcatacatagcagctgaatttggtttacctaaattgaggttgactgcttcgtcctgaatttccaccattcgctttgttcctgggtgttgaagagtgtactcaattcctttgatagttactttcttttgtttaccgaattttgacataggttttccctccgcttgtttagtttgcatatattgaaaagcagccctattggactgctttcgcgcgtttgatttcttcttttttgccatagcttaattactgttccaatactgtatagtcaaagacttgaatctcgaactcacgatctccaatctcgtcactgaattcagcatcggcaggctttttgaccatcgcttctgtgccgccgattttttcctgtccgcccgtaacccagatagggaaacgctgggccgtgtttgccattttattcaggtatggtacaaatggcgatcccatggaaagagtcagtgtaattgttccgagtgggttgtttttcgttgcaacactgacatcacccttggcgctgactttagtcgagaacttttcttcgtcttttgcacaagaaaccattgtgccctcggaataaccggttacgattttcccgtcaatgttcgtgttgacttcgtttgcatcataaacgtacatgctttatatcctccttaaattgagatttcaccagtgatttcagcagaatgaaccgcgccagccagttcaaaagtaaatgataggccgtcgtatacacggttttttctgttttcatctgtgatttgatcacgggtttttgtgctgattgaatacactggctgcccgtctgcatcttctgcaacaatgccatttgcaaaggctgtttgcagaacgtttgtgacctgtacactcagcaatgaaaaaccagcattcgagaacgggattttgccgttgtttgagaatgctgattgtattgaggtttcaatattcaatttcacccaatctttgccgtgcagcacgtcgatatattccccggatgcagtaatgccctcggatgtctcgttgtggcccgctttggttacataagcaatagccccttctgtatgcagctttttcaactcgtctgccttaatatcttgaggcgtgatgccaacgatatttttaaatttccaagttactgatcccactgtatgtgaagcaaccgaaccaacaaggccagcgtccggatgctcgtcatttaacgggtgatagaaaacaattgtgcgatccttgcctttgtaagaagcaacttcttcccggtcagttacctgtaaaactacaaatttatatgatttctcttccatcgcttttgccgcttccattctttcgtccgctgtagcatcagcaaggatcaagaagtgccagtccttgtcgaaatactcgtcaaacgcattccgaatggagaatgttgcttgtgtagtcgctccttcttctggcgtttctgtgctgcctccatacgtaccgatggcaacctttgacggtgcattgtcaccctgagcaaagatagccgcagcctttttatatgctgctgtggtttccggatagtctgccttgatagcttctaatgagccatattctttatatgtgttgtgtccgtctaccttcgcaagaatcagaggtgttcccaatcctttaaggctggacggtttcactaagtcaattttgactgtaacgtcactaagtggcatatgaattaccctcctgtattttcaattcgtacagagtcgaaaacctctgcatttgcttctccatgagacacacgcgttctaaagcgtgtatcgaagccgtgacggcgttctgtgtcaatcgtgataaatgtatctcgattgccgaaaccgtcgttcctgacccatgccagcccattatcatgaagcttttgtcgcgcttcagctgttttgaagtacgctgctgtttgttgagcaagggaaatggcctcaatatggctgtttgaaatccatgtaaaagagaaaacaagctcgatgtcttccgttaacactccctgttcttcaatgcctctatgttggggcaaatacggggaagtcacggtatacgtacaaaaaggatagacaggttgtttccctgtaccatttgcaacgataacgacatggcctgttttctctctaatcagtcccaggactgtttgtattatgctgttgtagtccatctgaattgatcaccgcctttaagatatagctgttgaaatcggcatacgtcccataaggcgtcatcgcttcaacatcaaaggtggcgccatcaaaaatcacctgagcttttagaggaatttcgttcttgataaatagctgcctgtccatagatgtaagccggccgccagattgatagacaagttgtgactgtaaaggtactattgcccctctttcatctgacttcgtcggtttcggtggcacccattcgccgagatcatcatatgaaccctcttcagatggaataagcaatgtaaaatcaacgctgtaccgcttaatcagatcagaaaatatgaaatgattccccatcagctttcaacctcataatccatagagccaatcatttccccggtatcaaccaatggatttgaagagcctttctcttcggttgtaaatggatggtttgccgggttccgcaagtctcgggcatacacttgaagccgccctttcgcaagcaggccgactgtttccatgatgtcattcatcgaatcgccattctctaacgctctattgaccagatcctctaccttttgaacgatctcttcctcgttctcgtcccatccagcacggatgaaagaacgctccggaatgttgatatattgagtttctttcttgaggtacagcccttttgcagcaaggtagttccgcatgcgatcagttacagcaatacggcagccaaattcgtgaacagccgcgatcatttgccgttcactgtccaggattccaactttcaccttaccgacggaaccgaggtttcttatgacttctggaatacggttgctatctcgtacccggacgtttctacgtgccattagatcacctcagtgccctaaagcgtatttttctgtagggtcggaataactcatgaacaggattgagcctttcttcatcagctgcataggatctactcatgcctccaattgattcagatagaacaccggacgggctttctctgtcaatcttaattaatagggcaatccccttttttacggccggaggaagagacacagtattatctggaccaacaaagagattgttgcagtatgccatcgcatatgaaatactatcttccagatcaatttgcagtttggcatcctgcgatgtgtcttcagctggaatccctaacctgacttttaattctgccaagtccatttttctcattcctttcaaagaaccggttcatatgtcgcaaaacatcggcaattaatatcattggatggatcaccgctttgtcccggcgcttctgctgttacatgaataccatttttattgatgccaagatcaaacaactgattgaccatgcgttcctgcccttctaaatggacatgatccgcatgttttgtctcacggactctttcatcgccaacgttgtgccaggtctttttcatgttgatgccccgtgactgagcttttttagcagcgtcaagcgttgctttttcccttgtgcgatgcatttctgtattggctatgcgcttcgatcggttgtaactcaggccgacatctgtctgcagctccttcgctatctgagcaaagcgtttccgctcaataaaaccgcgttcgattgtcttgttaatctgctgtattgtctttttgcgatcagtttcaatggctttgtccatttgtttacttttaatagcctgctgaacgtctccgggagcccattcagcaggtaaattcatctgattcagtgttgcttttggctgcgcaagtttgatccctaacgcagccagaacgccaaatatcagccagctgtaagatgattcgtaggtttcttcaaggaattctataatcatagctttgactttcgctgaaagatcactaatcaacgaggtgatttcccgctttatacggtttagatcaccgtgtcgattagcgtcagcaagtgtcggttcttcgatttgatcaagcttgacgaataacgcagtcagctttgacagcacctcttttgaagcacgctgaaaaagccgcttgagtttccgtaagaattccttagttttacggttcaacggcttcaaaagctctttttcagtttgttctttatccaccgcttaccctcctactcctcggctgtttctttggcgtcagactcttgtgtgtcctcggcttcttttttatttgtgcccttgtccagcttatatccaagtcccttataaattacctcgaaagcacgttccgtcacttccaaagagtctctccccttcttgatcctaaccattaggcagtggcacctccatcaacagcagggactaaggctgcaaaggcatcctctgcaagagtagtgaatccgacttccatagttgctcgaagtgcgaacatgtcacgctcgaataagtttagaggttcgccggcttcatctacagttgttgtcaacgttgcatcctgagaaatggtatattcaatgtcctgaagaataccataacgcgcatagtcccaagcccctgtaataaggtcagcttttgttttatcccatgatttgctgtcaacaaacccaataggcaacccaagagcttgaggtgttgcatctgctgtcacttggttaaatagtggcagcccgttattatcttttgcagcgcgtaacttttgacggaaacgtctaatagttgtaaatgcatcaggatctttgtctgcatcttctacaagcgccattactgcagcgagatcgtcataaacagttgcccctgaacccgcgccagtaccagatgtgatcttttggccggacttgttgactctttccatgattgatacacctgtctcaaaaggcgatcccaccccaaacagtgcggcttggtcaaacttgattgcaaaagcttctctaatagctgattgcatttgagtaaagaagtcagcaactgtgtagcgtaagaattcttttgaaactggaatgataaccgcaagtttcttcgatgtcatttttgctgtgagccatttggcgctgcttgtttgaatgcgttcaccttcaccaacccagtaagcgccaggtccttctgctaagtacgtgaatgtctttaccggttttgtcatcggttcatatttagcaagctgtgtgattgcagatgtctgcataaattctttcaacacaatttctgcttgttcttctgggattttcccagttactgcatcttgtagtaatactgttttgggattaaatgttggcataatagccctccttattttctgatatttgcttggttagcgagtgccccaatatcaaccgccccgccagctggtgttggatcacctttttcgaagttagtgccgctctctttgaatttgatatctacagcattttgaactgctgcattgaatgtctcttcaaacttactgagattggcaagtgttgtttcctcgtcttcgccaataaaatagtcaataactcctttaggcagcttcttttcatccgctacattcaaggctttattgaccaatgcttcacgatttcttgctttttctgcatcttctatttgttttttgagcttctcaatttctaattcagccggagatttatccggattgcgttcacgaattttctcttcaacgatgctatccaaattgtttgccttccatgttgcaagaccttttgtgaagtaggaatccaggcgtggctgaatgaatcgttttccctcttcagtttcaaggaacccttccaccttatctgctgatacggccgaaagttctcccacaaatgcttttacttgttcattgtctttattatcttcgagaaattttttcacttcttctaaagttggcattacgtttcttcctccttcgccctctacagtacgcgcctgttatgagtgcatgaaaaataagcctttttaaagtcatgctcaggacaaatacagatgatcactttgcaacctctttgaagtcatcctcatgtcgattcttatgccagtttctcgttgtattgtattcatttttcgctaattcccattgccatatatctatttcagcaggcggattctctccatttgacaacgcaattgctttctccatagctttttcgaatgtagggtagattcctaccttatggggatagcagtcataataatcatcactcgtgtactcaacttcaaagaacgtcattacttacacctcgaatgtcatcattgtccttttcatcctcaaaatcataagcatcttgttcagctttcattctctcaatctcgtattgcacatcatcgacaatagagagtgttgaaaggcgtgtctcttcgcttacctgacctttaagttgtccggatgtctgagcctcttccaagagatttgacggcagattgcgcttgaatgagaaccatacctttaaataatcacctgctgatacaagaccttttttcgcccatgctgagcaaagcaatttgtactgataccgaagggcagcagtcgttttcctctccatcgtgatgcacttattttcaagggccatcagcttgtatttcattgcaacgcctgtcacattcccgccgaatgattcatcagagaaattgaccgactttgcaaaacgaagaatgttttcttcaagcctgttcagatggttttcgatcatggtgtcattaatgtcttttgtcaggaatttggcatcatcatctttcccaaacatttcaagcacaccggtctttttcagttcttggatgtcttcatcatccataccagcgccctttaaaatcaaataagctagccgtagctgttcaatctcgtttgatgcatctgaaagtgtgcgatcgtatgcatctataagtttaattaccttttccacgtcgcccatctgttcatcattgttaggcaacccgaataaaggacaataatcaaacaagtggagcttcttctctaataaagtccagccacctttttgtttttcgaaaaaataggccatcttgtcatcgtaaaaagtggctttttcacgctctatgctttgattattgacccaatcaaataccttataatatctaagtgcgaaagaaggctctgtgatgtcattctcagcaataatgacaacttcccatggatttacattcgcaactcttaccgagccgtcaggagcgatatacacaagtctagcaccatatccacaaatagctgctttcttaccccattcgctatcagcatcagcaatgttatttatggtgttaaagttattgatttgctctgccaaggccgtatttttgttttccccgtctttctccgtctcgtatgagattggatggccgaacatatacccaacctttgtatccactatctcagcatcaaaagcattattcaggcggttgtttaccagatggtcaatacgccgaacctttcctgtttcaaaatcatcgaattgagctgcctcccgctgtaagatcggcacaccggcaacactagccatatatcgttcatactgagctatggctttatctttgatcggcttatgctcttcaataatctgttcaatgattggaccgtctatctcattatttcgaagataatttaaaaacttgttcatgttctcacccctttcctttgcgtctcataggtttgttgtgtgtataaatggcatatcggatagagtcgagcacatcgtcccactctttaactggctcgcctgtatttggattccaaacatacataaagatctcttttttaaagcgactaactttatcttcaacaataaaaagcagatcccgtttgaacagccgcgccacttcttcgatacctgaaacaactgccttatcagcatctaacgcacgcaacttctctctgcgaaaacgtacgatgtgttcaggccgagctgtatcacaatagaaattaatgttgccgtaccgctctttgatgtctttcgctaccttcacccagtagtcaatctcttcgtgccgcttgcaatgttcttcaagcaaataaaaacacccttggtcatcttgtccgattacgacaatagaacccgggtgatcatatccccagtcaacaccagtaaagtatttagtgaagttgacttgtttatcttccatttctttagaactgatatagtgcttgtctttgttaaaatccttgtatattacgccttccggagcaacccagtagccgtaaatatccctgtccgtaaacatgccgctcggtgttgaagcaacaatactttcgacatactcaggatcaagaaagttgttatcaaacaatgagaagtgaaaagaacggatattcagcctgccgtttttcagccgctgcccgtctttgtcgatataatccgttttgacggtgtgcattgggttttcagggtttgtatccatcatgaccattgcacccttataggagcaacgagaaatgacttccttcacgaatgaatcatgcagggcagtcgcttcgtttaggaatgcgccagctgatgtgaaaccccgtgcctttttccatgagtctgcatttgcaccatcaaagcaataaacacggtttccgaatatctcaacggcattcgctttatcaaggcgcaattcttttccaaggatcagttctaaatcatttaggatattccgctttatagaagcctgagttgccccgccaatgataaaagaaagccccatgttttgatatttgctgatgtgcccgaggaacgtcaaaaggagcacgaatgttttccctgcccttttcgccccgctgcatattaagattttcggctgctcttcaataaagctgttccatacttcttgttgcttagagttaagttccatgaggtttcaccatcttccgaagcatggcagcaacttcattttcttgagagtttccgttatcaccatcaatatctttcttcgccttctcgatattcaagcgcatttgctccaatttaaggcgacgttcgtcttcttcatgcgccagtagaacaaactgttttatcaagcttctgagctctcccattgcccgagattgagcattcaggaatgtggcctgacgatcccaagcgaactgtatttcaagttcttcctcaacaatagacttttcaaaatactcgtttccatcttcgtcctcttgaggttgataaacgtattttgcttttttctgttcttttacaagatcatctttatcttgtacgaacatgataggctgcgcccgaataatggctgcatattgaatctgtatctgatcccatataatatcagcaggcgaccgttcctgaatctcttccatgatttcaagcgtttcttctggcaggaatttagagaaaaagccgtgagtcatagcgttttgattcctctgtggtgcgccgccgttattccctaatgcattcttattgccgggtggtgcgcctgccttttttgtgtgcacacttttttcagtgggtgcacccttttttctttcccaaccatgccgctgtttccacgattttatggtgttcactgacaccccgtatttctcggcaaggtccttgtatttcatacctttgacgtaatctttctgcgcctgaatgtgcttctcagccatctacattcaccgccgcccccttttgaattgagttgttttggaaaaaatattccctctaaaccaccaccgtgctcaagccgttaaccgccaattgtctatcctgagacttaccggaagcagtttacagagaacataaaaaagagccatatagtttaatggctcttcctttattcaacaatttcaatatgtgtaatttgagttgggttaataagaatagattcaccaagatcaatcagacgatttttcaaaactctttcaccatccaattcatcatgaaaatagtctataagattttccacatctttcatatcttcataagaaatttcaaaagattttttattactcattagtataaacactttcataattttcacctcccacctaattatcggataaggagtgtgacaagggaactatttgcaaaatttgtcgaacgaaagcgcccttcataaataggtggcagtcgtaagacaaaaaaagcatccccaagggatgccttatttaatcaaatctcttaattctttaattgtatggaaccattcgcaaaatttgtcgaacaaagacaaaagaatatcactttttgtttcttttttttcggttgttttttgtctgtgtttctatttgcacactttcagtttttttgtttttcttctcttcagtttctaattcttcaattgcttcttctaatagcattttataagtacgtagttttccataataattaagattttttgtcacaatccatatccagagaccgattaaaattaataataaaatcccgttaaatattactatataccttccgaaggttaaacccgttttcacaatagtatctaaaagttctgtcggatctatagaatgttttttatcaatatttactgctatgttggagaaagcattaaaagtgttaaaataaaacgtaaaaatacctattagaacactgatgagactcgtaaatagtgatgtatatatagcaaatgggatagttttaaaagaggaaatgtctcctgaaactttaaggctgttattcaatctggaaattaatttttttatttgttttggttctagtttctttttgactttctttttaaaatcttctccacttttaatattggaatcctttttataaggtgtaccgaaatgctctaagtatttagatacatgagttacttcgtcaaacggaatttctctaatttcacgattatctttttttcgataattaaacacttttctccataattcaaccgctaattttttcactatatcacctcctatattttatcggacagacgacaaaacttcgaattgcttgcaaaatttgtcgaacgaaagctctattcaaaaagtcagtcttaagacaaaaaaagcacccttcagctgcgggtgctcatttcttcctatgcttctggaattccaatatatcctctttaataaaaagcctgtccctcggcatttctttaaccggttcaagttgaccggttttaattagctgattgagatattgacgagtaaagcccaatatttcaatcgcttcacttgtattaacgatctcctcattcaagaactttttaattgcatcacgctctttaaggctgtacaccaagcatcatcctcttttttctcgatatttttgataaagggaaattgacttttccacaattgaaacagcaaacaaaacaattatgcatatatctaaagttgtctttaatggactggctgcgacatgctgtcgaacaaataacatgtatcccaaagcaagaaggacaaaaatatcagttgacattcttagtttttccatttgtttgaaagtggctgctttcatcgttatataattatttgtgtcacttatgttatacttggagcaagggagaagctccaccttctccctcggctcaaaatcatctacgctttcttggtcgtctgcgtcttttgattttgggcttttttgttttaagcttttctcttatgataagagctttttcaaagatagtgagtgctgtaagtatgatgcccagtatcactgcaattttagccactttcgttcccccctttctatactttaattatatacgattactttactcacgtcaagttaatttagagaattttttcctgttttctcataaaaaacacctattcatgctaaacagaataggctgtgttctgctctatttttcattttcaaacgggaacgctcaatgtttttctggactgttccttttttaatgttcagcagctgggcgatctcctcgaaagacatgttttgcacagtatgcatgatgaaaatgtccttctctctttcagtaaggacagaaagggcatcagcaattctttctttgtcccagtcgcttacctctccttctggctcctgattgatcgcatactcttctggcattgcatcaatgatacgaggatcagcaagaatcgttctttgataaacgtctcttctgtcagctccccggcgtgctcccggttgtctcccgttctgcagccattcgagagtgaattcaatatcgctaatcatactgccaatgattttcttatcattcttttgttccgctgtcatttcattttctggtgtttctgagaatgcccggtacatctttctcgcttcttttaacgctcttttgtattcaatgattaaatcctgcatgtttgtcctcctcttatttacgcttaaaagcgccgcctttgcatcttctgagtgtttgcctgtctcgcctgccaaaacctttcagaacgctccttcgcgtttttactggactttttcttctcttgtttcatttcgtccctccgttcaaataaaaaaacggacaccaaccaaagtacagaattctctgtacagtgatcagtgtccgcaggctttccatcttggactttatttaaattaaatgttttttcgctatagtaaataatggcatagctatatcaaataaattcttctcaccaacttttttatagactactatatttccatccttcgttaacaagacacttagaatatcatcttcgttttctattggattcggcacatctaaacgcaaagcagaaataattccatcactttcttcataagaactccaattttgactcgcggtaacagtacccccacctaaataggcaacttctacatcggctatttttaaatctctccaccaaccaccttttattgcagcattatcattttcttctaattcttcttttagttttcttaaatctatagttatagcttgtgagttatatcggttatccccacgtcccacagtcccatcgattaatcgcttaatcccgtgttcaataattgattttttggaaccccaaaaatataaaaaatcatcatctgatttagccacattgaaagtttcatcagcagaaatagcaattatatcgtgtgccgttccatcttccaaatagccttttcctgtaaatgaatctcctattggatgtattacttgatacttttttaaatcttcttctgtatattcagtactacctaggtttttaagcgtagttttaaaagattgactttcagaaccagtattaaattcatttgtttctaatggtaattgttctgggaaattgattaatctctgcataataattgattgcggcatttaattctctcctcacaaaatcaatttaattactttgtccaaagctttaattaaagatgttctttgatttgtcaccaaaactatattcttttcatgcgcacttaactgtacaccaggattacttttaattttaatattaaaagataatatatcagatggcttaacctctttaataaagtgttttttcatgaagtcaacttttttagtgtttttagcaactttcattgtatacttattctcttccacccctaaatcatcacaaatcctctggtaaaagtgaactataaaatcttcaataatttcttgtccatttttatactttaaagtagcagatgcacttacattcaaattcatctgaccaaaattatctgtttggataatcgagaaataaatcttgtatggtttaatgtacattttaacgttgttaaacttatcaaaagagacttcgactaactcatttttgcgccctgtatgacctttattttttagtaaatcataaaaaattgtttggacttccgtataatcatctttaattttttgtagagttgaattttcgactatgttaaaaaccgcttgaaaatctatatcaaaattatcgaaattaaagtgatttttcacccatctaaaacccactctaaatttttgggatttgtcatatatagttttaagtaaagctgctaatgttggtaaaataatgattcctgttgcccaattaaatccttttgtgtaaaactgaaaaagcattgttgcaagaagactgagtagcattaaaacccacatcatctagcccccttatctaataatgtcattaattatagccataagatattgcttggtaaacattctttagaattaaatcaatcaacttcctctgtctaatttacaacaatgtttatcttttccacagttttcagtacaataataccatttattttcatattttttctaatttttttcaccctttttcacccctccatcgttttttcttttttgatgaattattttcaaatctctatttcctcctcaactcaacgcccatgctgcagccgcatttcgggcagcgtgcatctgggcggatttttatatctaattcgttgtgaccacattcaggacagctgtattcgatcatggtgtcaccccctattcccagccgactgcaattgcaaagaataaaaccaaaaccatcgccccgattagccagccatttgtcttatcacgctttgcaatgattgtttcatcaccgatcattttcaaatcgtctgactttgccacgagaactggtatgtaatctggatgcactttcaaatattccgccgcctgctcaactgtcatcgcttcgtctttcgtggctttgactgcccgctgaagctcaacttgtaaaggaatcatttcgcatcaccttctttcccaagcgaatcccaatcaaacgtttcaagaatcttaagcaaccgttcaacttttggtgctctccaagctgtcatagcgtacgtatgagcttctgaagtgtaatggtgcttgttcaatttgatgtggctctttgcttctgcttttgtcaaaaacattgtatttggttgtataatgtgaacctttctttctggaattaattctgcttcttcatcaatgtatttttgaatccactcaacagcatcttcatagtcgtcctcaatttcttgcaactctgttaaggcttccttagacagctcactatcttcttttatttcttctagataatcatcaaaaacataggcttctgcaatatatggcaggtatacagaataacgctctgcgttttcctcccgagcttcaacccattcataatcaccgactgtccaaaaccgtggtgcagcttgagaatcacgatcctgtgttttcaattcattttgaagctctttcaaaaattgaatatccttgttcatttcacatcaccctccaattcattttgggcaactgttatcgcgaaattgagattggtaatgatcttctctaatgcctgtttgtatcgtttcctatccccgcttaaatgctgaatgtccttttgagcctgccggaattgatgaaccgttacttcctgctggcgtttgttttcctcgatgatttcccgctgtttttctactgattgaattagaaattcttgatcctcaagaatagtggaccaattaacatcaattttctttttataaagtgaagttgctattgaaaatctattttttatttcctgtaatttatccatgccgttcctcccccgcaggggaaagcccctgctatttgattttgaaacctatttcgtgatcgactcgagcaaagcttccctttgccgtttgaatgattgttttgccatgctccggggcttccaagacatgtgcggtgccctggctcccgtctaaaacgatgatctgtattttgcccgactccattgcctgttcgattgttgtatctttgcttaaattaatttctcttgggttgtacattcttagcgccccctgtgctatgatagaagtaccagttcatatcagagcatcggggcatacgcttcggtgctttttttgtgtttaatagtgatccggtttccatccagtcattgtgaatgttggcgatggtttcagatcctcacggtaaacgatcgggtgttttttcacgtattcggccagctgttccggcgtcatcttccattcttcaaccggtcctggcaggtaaggattgatgctttgctgttccatggtatctacctcctgaattgattttgggaatttccgtgccgccgagcttcttgcaatcagaacccattcggctggcgcatgccttaaactgagagcaacgtgtcatacaggccatgagcttatcttcttcctgcacccacaacggccgatcgtctgcgattaccacgtttagcagtggactttcccgcctttcttttgagttttttcagctcgtccagctcgatgaagccgagtgacttatccagagccagcaccttgagtggcgtatcgtaaagccgctcatacagcttgcgcttgatggcaaattcctttgtttcaacgcccttgatgtcaatgatctcgatgctgccgtccaagttatgaacctcaaagtctgcaatatattcaatcttccgaaaagttttgccgttctttttgaatgcctcttgcagcaggaaccgtggctgcagcttaaaatctttgatctgcttgctcaccttgagccatttcagctgctcatagtatttggcttcggcccggctgtcgaacgtgatgccgtctacctgtgtttttcttgcgccgtacttatttgctggcatgtgatgcctcctgaaacttattcttttgttctgcaatctccatttctgacatgccgcagtcaatacaacattcatagtcaggtatttgcaaatgaccttctcccggcatagtgcagtaactcatttccatgtgtttatgttcacaggattcctgacgttttttctgttcagcctctttgacaaccgagcagtattctctttcgtgcaacctagcaccgtgctttgtcatcagccgctttccgcaatgttcacactggtaaagcgtctgattttctaacactttcattctccttacctcccgtcactctcttcccattgctgaatctgcttttcttttgctggcgccgttagtatgattgccggcagcagcatcaccgctttaagcactcggcatcagctccatttgtctgatcttttcctcaagcacctggatagctggtgtgaggtccttgccgcccttttgttcagcaggcccgaacaaatacattcctttggatcctataacgttcgttttctcgttcaatcccaatcacccaatctatgatttaattccatccggttgccctgaatgatcaccgtgtaatacttgcacatctggtaaatccgagagcccagcgcctcgtcaacgtccagcagatcgtccgttgtgagctcagaagagatcagcagaggtttatggttcaggtagcgataattcacaactgactggatctgttcgacttgccattcagttgcccttggcttcccgtcaactggcttgaataagtcatcaatgaacagcacatctgcttttctcatggcgttcagctttgtttccagctggtcaaagtcatttttcagatcactcatgccctcaacgtaagggaagtacaggcagtgagttgatttcttcttaatgagattgttcatgatggccgttaacagatgggttttgccgctgcccggctgtcccagcagagcaatgctattggcacgctctcccttgatcttttcaaagtctttgaagtattcgaccgcacattcataggcatctttaatcatttgaggtttgccatctaatttgaagttgccaaacaacagcttttcgaacttttctgtaatgccgctggctgccatgagcttcgctattttcttttgtttcacacactcacattgtttggaatacgtcgttttccattcccgagccttatccggcgtgcaaacctttcctgcaaggtaatcatcttcaagaaccatttcatcaagtgataggctgtccaatggcttgtgttcttttctcaaccgcagctcagtgtctttgtggatgcggtagatcacaacgccgcgatccttgcactcagagcattcatattcaaccttttcttctgattcggcctgttctgtttcccaggaacgcgatcttgcttgaagacccttcatcattgcttggaacgctgtgtctatactgactgctttgtttattgccatactgttgtttctcctttctcttttggcttaatgggttggacaggatcgcctcaatgtagttcaagccaacgttgctgcctttatttctgaaagcctttttcattgcctcgatgaccttctcttcgccgtaatcatccaccatgtagccgattctttgcgcctcaatggagccgatagaacgagcgaccttattttcgaatagctcaaaagcgtttttcatttttggatcaacctcctgcgtttcttgtggtgctggtgcaagttcaggaacaggcttttcagatggttcctgctccgttacaggcgtttcaaatgagatcagcctgtattgccctgccttcctcccctgcggcttatattcaattcttttaagatcaatcagcatctttcggtgtttgatcaacgtattttcggaaatctcaatctttgcttgcagagtggtatttgaagtggtgaaccactctcgccaccctgccttattgttgatgtgcaaaagatgaaaccataatgcttgagttgtagcagacaacggattcgtttctagccaattcatgaagccgttcatttctttcaggtagttcatggctcacctacttcctttcacacagtgctgtcattccgctgatacggactaaacgtaagccaggttcatttgttctgagatagccttcaacataagcacggaacagctgcgcgcgatttggcgccccttccgtcagccatttgtaacagaaggggatgccgactttaatcaaatgggaggtcatcttcgctgatgtctacaggcttgccgtcaaaaggatcagcgtcctgcgcgcttggtttttcctcagatggttcggcatcaatgatttctggctcagacatttcgtcagtgatgtcaatgcgctctcgttcctcgttatcctcaataactgccttttgcatttcaacagagagtatcccccacttgctgagcatggattttagaacggttttgagtgccatcgcatcccagtccttgccccaaccgaagtccgacttgctaaatttctttttgtgtttctcaacttgcgcctttgtccaatagacagtttttcggaatccatttaaaagctcaaaataagcagcgtaaccaataaccgaatctgattcccgcttttcaaaatcaatatcaatttcctcggtcaacggattccacttttgcaattctccttcatgaaccggtatgcaattgatagatttatattggcccgtccgcaaagcaagctgaatgtatcctttgtaaccaagctgaaattgcgcacggcctttatacggaacgatccaggcataacctaagttcttatccactggcaaatcgagcgttgccgccaccatagccgatgaaattacactcatagggtctgccttttgaagcgtattttcactgttgtacaggctcagaattgacgctgtgaattgagacgctctttttcccagaacttcttcgaatcgattcatgactgctggagaagaaagcaggcccttcatcgttgttccctgctgttgtcctggggcactgttttgtttcttctgaatgctgtttttaagcgtttgatttgtagccatattcagctaacctccttaattccaaagcgcctgaattgcacttcttttgtgactttctcgtatacatctggaaactgctctttcaatttcttgctatcgatccgattagttgaaactgacttccagctagtttgatagtttccgatgaatccatattctgcttccttcatttcatgtttgatctggttttctaattcctttgcctgcaatgacagctcgttgatctgctctttcagctgtaaatactgctgaatacgtgttttattatcagatgtgagatcaacgactttgccgccttctgcttcggcataacgttgcttgagatattcttctgcagcactcgaaccgtcaagaaccggagcctttccgcccaagaccttttcattccaaaattcaatttcggcctgaaagatcattgcaataagctcgtcatcgcgctcaatctctttccaaacgaatttattgccgccgatcagtacagcaaaatatgcttttttatattcaggccccagcactcctagatagtgttggacctgaacaatatagctgtcaggaatctcgtcatcttcccactctttcaggttgtatgccgatgtggttttgcactccaaaatggctttttcgccaacaatcattcgatcaacgtttgccaatataaaaccgtgcttaggatgcctgagcattgcttttctccgccttacttttttgccgctacgtatctcaaactcttttgcaacgatatcttcaaggagtgaaccgaagtaggctgcctcacttcctgattcactcacaggtacttgacctgttttgtctaaccataattcaaacggtgttcgccatttgtttatgcctaaaattacagaagcatctgaaccgccgatgcctttccgtcgctcaagaagccattcgtcccgactcatgtccgctgtcgaagcgaaaacctctgcttgcatcagagcagccccacctttcttttgtaagcttccgcaccaagccgctgccattcccggtagtgatccattgaaggaaaactaaactgcgctttaccgtttttggcgaatacaattgaaccgccgacctgtctcaaacgttgctgatcctccgcacgctcgctgaacgccactttaactgctttagccatgtataaaacctccattgattttcttgaggctatctggtagaatattgatatatgagttttcagatagcctttaattaagtccactctgccaagtgggcttttttattgctcatttttaaattcaaaaccaagatgctcctttaagtaccgctcaaggttttccctcaagatgacttcaccctcagcgctatctatcacgtaatcgtcgaaaggcgttacttcatccccgaaaaaatcctttggtgtttctggctcagtcagcttgtcgtgccaattgtttagaatcatcgggttttcgatcgtcattcatattctcctttctgtaattagctatgcgttcatcccaaatcagataaagttcgctatgatttcggattctttcacaccatgctctgacctccaacgctgtcgctggtttatgaacaaagtgaaccatcatcctaagctcctgcgtaccactgataaatcaattccacgctgtttcagcctcatcgctgcatcatataagcatcccttatttgaaatccgtttaagatcctcaatgtttgctttgatactgccaaggatgtctaaagcttcctcgtagtcgccttctttcaaagagtccagtaatagttcagccaaactttcaactgaatctgatttccgttttacgacttcttcatctgacttcaaaaaatggttgagtttcatacgagcatcgccttcctttcctcttgttttgacatagcaacttgatccattaacgctttccgcgtccatttgtctgcaagctcctgcattttcagaccatgacttcgagataaagcataaaagagagtgtctacagctggaccaaggtcaagaatctctttaagatccgccatcggtagcgcctcaatacggccggggcgttcattcgccaaccagagcgcgatattttcagcagcctcaagggattcctttgtctgtttcataaaattgatcagggctttactggggctgacgttcaacgccggatcgactggggctgttgccctcggatgaagccggaacaagtaatgtacaaggtcaatgtgctcataagcgccgcatatctcaaaccatttgatgcaaagttcaggcgttagtgtggtcaggccattttcaacgtctgatacataccgttgatctttgccgccaagtaactgccctaattgaaattgagtaaatcccattgtctttctaacctctctcataatttttggtaaattatcgagtttatacgggttgttcgacatatgttcgcctcctgtttcacggggaattatttggtaaaatttaagtaatgaaggaactagctggcttgctgttttttcagcttattgatgatgaaggcttgtcccttcggagtgatgcgcattgtcagccaggatttcggcgtcccgtttacttggcgcaccccctgtgcgatctcaaagaaacctcgctcgatgtattcctggtatggctcattcttgttggccatgatcatcttccattcgcgcagcttctgaaacagtcgcttttcaccaatcatgatgccgtttttcgaagcaagctttgccagttctctcacaagcaatgatttttcggccgccatgcaactctgtgcaaagttgaccaatggttcctgaatcttcaatgcttgttcaagttgctgccgttcttcctgctcgctgatccatcgctttgcccggctgactggatcttcgatcatgtaggacggttgagtcattttttgaagctcggcttccatccggttaaattcagcaatgtatttttctttgaacactgctgcttttgcacccgtataaccaaaaaccaaaaatgcgagtccatcacgtttgatcagatattttttcaatgatcgtcctgttggatcttcatattcactcaacgaaaaatttcgttcagtaaaatctttagagcaattcagtgtttcaatgctttttattacatcggcgtgtcgttttccgaatacctcagccactgttaggctgtctgttacggcttggttgccttcaataaaaacaatttgattcatgctgttacctccttgcttgtccaccaaaaaaaggtgaagcagataattaagcgtgaagccttaattcttttttagaagtgaagtacggctcaagagctttacggaaacactcttctctgtccatcgttccgtaatattctttgcccatcttgatgtttgttgtttttttcttagtttgtttcgccatgtgatcacctcacgtcagtgtattcgtgttggacggttggactaaccaagaaattaagcagattcaagatccccattcttcatttcgtggcattcttcttcaaaaaaaagagtccaatcaaaatctaaaatgtttgcgatcttttttgcgacatgaggtctgacattcctttcgccagtctcaatggcaccataagttgatcttgcaatgccaactttgatggcaagttgttcttgcgttaaattggcatcttcacgtttttttctgagccagtatttcaattaggatgcctcctttcgttctacatatcgtggcttatgaatacatattaaaccacgatatgtagaatgtcaaacctttttattaaaaaacacgtaatattttcttcatttcgtggcatgtcgtttaattccacaaaatgtagagttataatgaatttagaatttacctttaaaagttagtaggtgatattatggcgattaaacataggctagtcgaattgaggaaaaagcaagggcctcatgtgaagcaagaagatgtggctaaagctttaggtatagcacgctccacttacggtgcttatgaacaagggaaacgcgaaccggaccacgctactctaataaagatagctgattattatggagtgactatagattacctactaagagatgagccagagaatatgaaaaatgaaatcttcaacgaacaagcaagaaagattcttgaagatcctgatactctggtagctgctgctgatggaaagataacagcttcaattttagaggcagctcaaagaattattgctgagcaattaaaatcaggtagacaacccggagatataaaaaacgggaacaaaaaataattacataacgatcgctttatctttatttattattattgtttagtttagtttagtttaattaatgctgaacacttcgcctcaaaatttgaggtaaactattcagttgaaaccatttcaacctcaatttttgaggtgatccatgaggttatttctgcattcaaccgcaaattttgaggtaaaacattcagggtttttcactcagattttagagagaaaaagtaaaaaaatcctttatttagacgatacaaagaaagagattgcacttcattataaaaggggaaattacaattgaaaaaatggttattaggtattggagcattgactcttagtttttctttagctgcatgtagttctgactcttcaagtagtaatgaaaaatcttcttcaagcaagacaagctcacttagtgctgaggaccagtttaaaaaagatgcaaaatcatatgcctatgaaaaagtaaatagcgccggcattaagaaagggacaaaaattgtcattgaaggcgatgttacttatgcagataacgtcaatgatgatggggatacagtttctaaaaatgttgagtttactgtaagtaaaaatagcgatggatctgaagtttacacagtaagcaataaaagcgctgataagttcaaactaaacgatacggttaaaatttatggtacatatgaaggcagagctgaaggaagtgcccttcctaaagtgaaagccgtttacgtcgataaaattgataaagaaaaagagcaagctaaacaagatgctgcactaaaagaacagtttgaaaaaactggcgaaggtgatattgaaggactgggccacgttaaagatatcggcgttggatataacgacgaagtcggaattgacggtaaagacactcctataaaacctgttacgatgggcagcatgaagctttatattaacagtgtcgacgttctcgaaattcaaccagatgatgatgcaaaatcactttattttaatgatcaagataaggttcgggctattgttgtcgatatgaaggccgaaaacacttcttctaaggacgtaacgtttgaccctaaccaagctgttattgttacaaatacaggagaacagcttgaatctgaaatgggattaatgggtgaagtaggcggagacttcttagggaaagttaaaaaagaaggccaggcatggtggatacttaaagataattcaaaagatatcactagtttgaaaatgattatttctcctccaagtgatgcaaaaacctatgatgatttaggaagcgagaaaagactagattttgatatcttgagttttgaagaagctaagaaaaaagattcaaattaaattgagcccctaaagggggcttttcttttcgctaaaaagagaacatacgtttgttcgccttcgacaaaataggtgataagatacaataaagcccatgataaaagtcacatctttggttatttaagggaggtttcatctttgagatacactaacagccatttagaagattggattgaacagctttacagggagatcaatattacaaagccacatgagattaattttgatagaattgctcaggccttggacatcttaattgtttacaatccggaaacgagttttgctctgcgattcaacggcatgtatacaatttctttagattcacgaaagacacgacaggaacagtggctggattttgctcatgaggtttgccatgattttagacacatgaacgatgataagatcatgcccgcttcgtggaaacgttatttagagtaccaggccaattattttgcttatcacttttgtatacctactttcatgctccgagcaatggacatcccccgtaatctatacgacgcagttcaagtcattgccgatgccttcaaggttccagagtcatttgcgatgacccgcatcaatatgtacttcaataaaaaacgactcatcatataaaaaagagcctctaaagggctctaagtttgcgaccggtatgcataccatttgaaatatggtttcgaacggttttctcactgataaatagctcgcttgcaatctcctttgttgtcttatcttgaacgagcaattcgaacacttctctttctcttttcgttagcagcggcttcgattgaaattctttctccttcaagtattgtaaccctccttgctaaggtgagagcgaatcagaaacgaatgggttttgatatagtcgagatatcatatgtaagaagggcgcaggaggtgacgtttacaagataattagtttatcgtgtatgaagaagcgtttctttctcctcatctgtccagctgacagctttgccgctttcctttgagacttgaaccatcacgactgccccggtgaagcagggttcgccttcgaggttctctccgagatagtgcaaggtaagagatgaactgccgactgcgcttgttttcacatagatgcgcaactcttcataaggcatgacttggcgcaaataatcgcattgctggcttgccacgactgtcatggtctgtttgttttcactcatcatattcagctttttaaaataagaaatccgcgcctcctcaaaatatataaaaggggttacattattcatatgcccaaacatgtctgtctcggaaaatcttacggatacctcattgaaaaaagaaaaggatgttttccattcttgaaacggcatatcaatataagcgggaagcttcatcttttttcatctccttattgtttaaaaaaacctctcccatgcggaagaggttttttcttcttatactctgtcgcttccgaagaaattgcggaacgcttgtaagtttgtatctctattcaaggctgcaatcgaagtggtaagcggaatccccttcggacaggattgaacacagttttgcgagttaccgcaatctgcaaggccgccttcatccattaatgcttctaatcgttcagatttattcatggcgcctgtcggatgcgcgttaaacaggcggacttgcgacatcggtgcaggccccatgaacttcgatttgctgttcacattcgggcaagcttcgaggcagacgccgcatgtcatgcattttgataattcatatgcccattgacggcgtttttctggcattctcggccccggtcctaaatcgtacgtaccatcaatcggtatccatgctttaacttttttcaatgaatcaaacattctgctgcgatcaacctgcaaatcacgaacgactgggaatgttttcattggttttaaacggatcggctgttcaagctggtcaataagcgccgtgcaagactggcggggttttccgtttatgaccattgaacatgcgccgcatacttcctcaagacagttcatatcccatgtgacaggggttgtcttctcacctttgacattaaccggattccggcggatttccatcagagcggaaatgacgttcagattcgggcggtatggaatctcaaattcttcatcataaggcgtgctgtcagctgtatcttgacgtgtgataataaatcgtatggttttttgttcactcatgattatttcgccaccttcttcttcgagtaatcccgtttccgaggcgttatcagtgatacatcgacatcctgatactcaaattccggcgcttcatacgggcttacatgtttagccattgttgttttgagccattcatcatcattacgttcaggataatccggtttataatgggcgccccggctttcattacggttgtatgcgccaagggtaatcaccctagcaagctgaagcatgtttgagaactggcgtgtgaacatcgctccctggttgctccattttgtcgtgtcattgatgttgatctttttgaagcgctccattaactcctgaattttgtcatccgttttcaaaagcttgtcattatggcggacaaccgttacgttcgccgtcatccactcaccgagctctttgtgaagaacataggcattttcggttccgtccatactcataatatcagcccatttttcttcttctttcttaacgtgagcgtcgaataaagatgaagacatgtcttccgctgaagattctaagccgtttacatatttcaccgcattcggaccggccaccatgcctccgtaaatcgcagacagcagggagttcgctcccaagcggttgccgccgtgcatagaataatcacattccccagccgcaaacagtccagggatgtttgtcatttgatcgtaatctacccataaaccgcccatagaataatggaccgccgggaagattttcattgggagcttacgcgggtcgtctcccatgaatttctcataaatctcaatgatgccgccaagcttaatatcaagctctttcggatctttatgagacagatcgagatataccatgttttcaccgttaatgccgagcttctggttcacacacacatcaaatatttcgcgtgtcgcaatatcacgcggcaccaggtttccgtatgccggatatttttcctccaggaaataccatggtttgccgtctttatatgtccacacgcgcccgccttcaccacgcgctgattcactcatcagtcttaatttgtcatcgcccggtatggctgtcgggtggatttgaatgaattctccgtttgcataatacgctccctgctgataaacgattgatgcagcagatcctgtattaatcatggagttcgttgattttccaaagatgattcccggtccgcccgtcgccataatgacagcgtctgaacggaaggattcaatttgcatgtttgtcaggttttgtgcaacaattccacggcaggttctgtcatcatctaaaacagcgccaaggaattcccagccttcgtattttgtgaccagacccgcaacttcgtatctgcgcacttgctcgtccagtgcgtaaagcagctgctgtcccgtcgtcgcaccagcataagcagttctgtggtgctgtgtacccccgaatcggcggaaatcaagcaggccttcaggcgtccggttaaacatgacgcccatccggtctaataagtggatgattgaaggcgccgcttcacacatcgccttgaccggcggctggttggcaagaaagtctcccccgtataccgtgtcatcaaaatgttcccacggagagtcaccttccccttttgtattgaccgctccgtttatgccgccttgcgcacaaaccgaatgagaacgtttgacaggaacgatggaaaacaacttaaccgccattcctgattccgctgctttaattgtcgccatgaggccggcaagacccccgccgactacgataatgcttgattgactcatgatagcccctctccctctagtaatctagtactcttaaacaaatgcgaaaatcgcttttaagcctacgtatgacagtgcaacaaaaataatcagcgtaacgtatgtcgaaattctttgagaacgaggcgttaccgtgatgccccatgtaacagcgaaagaccataaaccgttcgagaagtggaaaattgttgataaaacaccgacaatgtaaaaaccaagcatagccggagagctcaaaatattcgccatcatgtcgaaattgacctcagcgcccatttgtgcggcaatgcgggtttcccacacgtgccagctgacgaaaatgagggtgatgataccggttacacgctgcaggacgaatagccagtttctcatgtagctgtattgacctgcgttatttttcgcagtaaacgctatgtacacaccataaactgcatgataaattaatggtaagaagataataaaaatttccaaggcatacctgaaaggcagactatccataaaatgagcagcgctattgaatgcttcagcgccccttgcggcaaactggttgacgactaaatgctgaataagaaagatgccgaccggtatgacgccaagcaaggaatgcaatcttcgaaaataaaactctctgttcccagacattactttaccccctgtttgataagtgcgaaatgtgctaaatctcttcccccacttctttcaattgtaagcactttattaagatttattgacaatttcattttactcctccctcaaaagggcgtcaagaaaacgcgtacataaattataattttccgaattggttagttgattgaaaaattttattttatcaatatatatttcttacttaatttttcataagaattacaggatcattctgtaatcctcccccctgtttgagctataatatacgcaggagagaggggagacagatatgaagtctaaatttgaagcatctattgacaacctaaaagaaattgaaatgaacgcctatgcctacgaactaatacgagagatcgttctcccagatatgcttggccaagattactcttccatgatgtattgggcaggaaaacatctcgcccgtaagtttcctcttgaatcatgggaggaatttccggccttctttgaagaagcgggctggggaaccctcaccaacgtaagcgctaaaaaacaggagcttgaatttgaacttgaagggccgatcatttccaaccggcttaaacatcagaaagaaccttgctttcagctggaggctggttttatcgctgaacaaattcaattgatgaatgatcagattgccgaatcatatgaacaagtgaaaaagagagcggataaagtggttctgactgtgaaatgggatatgaaagacccagtgtaatcaaaaaggcggtgactgcatagtcccgcctttttgattgtcattacacagctgaagggtgttttgaaagctcaaatgcatcgtgaagcgactcgactgctttcaccatgtcattttcgcttacgactgttgacactttgatttcagatgtgctgaccattttgattaaaatgtttttttgcgccagtacagcaaacatttcagccgctacaccgggatttgagaccatgccggatccaacaatggatactttagccaatttgctttctgtctcgattttctcaaattccagcgcgtctttatactcttcaagcaccgcaacggtttggtctgcatcttctgttttgacagagaaggaaattccagtcttgtcctcggcctgcgtttggataatgatatccacgtttatgtttcttttggcaagtgtcgtaaaaatagtagacaaagttgtcaagccgctagtcagcccgtaaatggttactcttgtgatttgatcttcaaatgcaatgcctctgacaattaaattctgttccatggatgattcctcctcaattaatgttcccgcttcggtttctgtacttgaacgcacttctaacggcacttggtaatttttcgcgaactcaactgctctcggatgaagaacgccggcgcctaaattggcaagctcaagcatttcatcgtatgagatgcccgcaagttttctcgctgatttcacatagcgcggatcggttgtaaacacacctggcacgtctgtgtatatgtcacatttatcagcttttaaagcggcagccaaagcaactgctgttgtatctgaaccgccccggcccaatgtcgtaatttcacaatcctctgtcattccttggaagcctgcaacaatgacaatttttcctttttcaagctggtctgctaaaaccgaagtgtcgatatctgtaattctggcgtttccgtgaatggcctccgtacggattcccgcctgccagccagtataagacacagcgtcatagcctttttcctgcaatgccattgaaaggagtgaaatcgtgacctgctcgcctgtcgccagcagcatatccatttcgcgtttgctcggctggtcagaaatagcttttgcaaggctgaccaattcgtcagtggattttcccattgctgaaacgacgacaacgacttgatggcctttctgtttttctgcaattgcgcggtttgccgcattttgaattttttcgactgagccgacggaagtgcctccgaatttttgtacaataagacccatgtattaccaccctttacattttggttcgtgcgggtgaggagaaagagcgctttgtccacaataaaaaaagcaatgagaggaatactctcattgcttatcaattaatcatcataaatgattatgaacaacgagatagccctccaagaaaatgatttcttgacagccttacatttattcaatgcacggccagcaaataataccgatggggttttatttgcttcggcgacgctcccctttcagcctttttcacagaatccatctttctccaaaggcatactcttgaagttcgcacctctatcttcaccatataacacgatctaactatgaaattagttcacattttatcagatcttatttaaaaggacaacattatttttgcaatttgtcgtaaaggagctgagccgccgctgcgggaacaccggcttttttgatgtcctcaaggcttgcttccttcatttttttaacggaaccgaaatgctttaacagcattttctttcttttctctccgatacccgggatgtcgtccaaaacggattgaaacgcgctttttccgcggatttgcctgtgaaaactgattgcaaaacggtgcacctcgtcctgaatgcgctgcaggaggtaaaattcctggctgtttcgttccagatacaccacctccagcggatcaccgatcagtaaatttgaggttctgtgtttttcatctttcgctaaaccggcgatcgggatatccaagccgagttcattttcaatgacatcccttgctgcgttgatctgcccttttcctccgtcaatgataatcagatcgggcagcggcagattctcacgaagcactctcgtatagcgtcttctgacaacctctctcatagaaccgtaatcatccggccctgtaacagttttgattttatatttgcggtattcctttttgtatggtttgccatcgataaacacaatcatcgcggaaaccgggtttgtcccctgtatatttgagttatcaaacgcttcaattctgtgcggcgtataaatatttaatgcctcacctagtttctgcactgccccgattgaacgctcctcgtcccgttcgattaaagagaatttttctttcaatgcgattttcgcatttttatgggcaagcatgagcagttcttttttcgggccttttttcggctggtgaacgtttgtttccagcagctgctcgatcatagattgatctacgctgtccggaactaaaatctccttcggaaggaagtggttgttttttgaatagaactgcccgatgaacgtgaggaactcttcatctgcttcctgataaagcgggaacatgctgacatcgcgttcaatgagctttccttggcggatgaaaaagacctgcacgcacatccagcccttatcgtacgcgtacgcgaacacatcacggtcgactagatcgttcatcgtcattttttgtttttccatcgttgattcaatatgggccatttggtcacgaagctcttttgctcgttcaaactcaagattctcagcagcttcatgcattttctcttcaagctcttttttgacctcattatagccgccccttaagaaacgtgtaatgctttcaaccagctctctgttcgtctcttcggaaatatcctttacacacggagcgaggcattggcccagatgatagtaaaggcacactctgtccgggagcttggagcattttctgagaggatacagacggtcgagcagtttttttgtttcccttgctgcctgtacattcggatacggcccgaaatagcgccctttgtcttttttgacattgcgggtgacaatcagccttgggtggcgttcatgggtgagttttatgaaaggataggttttgtcgtctttgagcatgacgttgtatttcggatcatgctttttgatcagattcatttctaaaataagcgcttcaagattggaggacgtcacgatatattcaaaatcctcgatttccgtcacaagcctttgggttttcgcgtcgtgagaaccggtgaagtaggagcgcactctgtttttcagcacttttgctttccctacgtagatcacagtctgctgccggtccttcatgagataacaacccggttgatcaggaaggagggcgagtttttctttcagttgtttgttcatatgttacccttccttatgtttaatcctttatttccagtttaacacgaacgtttgtttttctctatggttcacaattggcgaataaaaaaagcgatccctcaatcggaatcgctctggcatgtaagcagcggaaaattaaagatgtttgtttacaagctcttgaagcgcttcttttggtttgaagccgactgaagtttcaactacttcgccgtcttttaacacaagaagagtcgggatgctcataacgccgtattttccggcagtttcttggttttcgtctacatcgatttttacgattttcagtttgtctcccatttcttgatccaattcttcaagaacaggtgcaatcattttacaaggtccgcaccaaggagcccagaagtctgccagtacgacgccttcgcttgtttcagctgagaaagattgatcagttgcttttacgatagccattattgaattcctccaatgtgaaatgatgatttttagtatagcatctcccattcgttcacgctattttaatgcttacaaattattttttcctgatcacagccggtttactcatttttatatggttgaatgggatatgctctttttttaaaacacaaatctgataatggccccaatcactacaattgccccaataatcattaaaatggtacgaagcataagatcacatctcctcttcactgtcatgtactttaccatgccctgccggagctgttttaaaacctgaaaaagagcgccggcatgaagctccggcgctcttgcgcgattaagaatcagcacgcagcgtaagcaagacgactgacattggcgggagttttactttcagtttgtttttgctgagcgtgtattgcctgaaggattccggtttgacatgatgaggatcgtcaaacgtgttatgcgcattcattttttctgccgtaagaatgactccggaatggtccgctgccttgtgtaggcccctcagctcgatttccgcctccgctttgttttggtgatcgatgttgcaaattgtgatattgatatcgccttcagtttgtttcgacgctgaaatgctgatttgcggaagcgtttcaccgttccattcatagtcggcagacattgtctctgtggctaaaagagaagcgtcctggtgcaccttaaacatattgaatacatggtacgtcggtgtcaaaagcatccgctctccctcagtcaaaatcatcgcttgaagaacatttactgtttgggcgatgttggccatttgcacccggcggcaatgctgatggaaaatgtggaaatgagaagccgccaccagtgcatcacgaatggtgttttgctgatataagaaaccgggattcgtgcctggctcgggatcaaaccacgtgccccattcatcaataatcagcccgacccgctgctccggatcgtaccggtccataatcgtgccgtgtttttgaatcaattcatcgatgtatttggcttttttcatcgtaataaaccattcatcttccgtgaattctgtggctgatcctttgcccttccagaaatcccccggaatcgtgtaataatgaagactcaacccgtccatcaggccagcggcttttttcataagcacgtccgtccaattaaaatcatccacatttgcgccgcctgcaattttataaatgtcattcccgctgtaattgcggacataagtctgaaaacgccggtacagatctgcgtagtattcgggatgcatgttgccgccgcagccccagttttcattgcccacgccgaaatatttcagcttccaaggctcttctcttccattttgctttctccagtctgacatcggcgtgccttcttcaaatgtcatatactcaatccactccgccatttcctgaacggttccgcttccgacattgccgcaaatatatggctcgcattcaagcagctcgcaaagcatcataaattcatgcgttccgaattcatttgattcaattgtaccgccccagtgagtgttcagcattgtcttacggtcaccgacaccgtttgcccaatggtattcgtccgcaaaacacccgcctggccacctgaggacagggatgtgcagctgtttgagcgcctccagcacgtcctttcgtatcccgttgatattggggatgtctgagtccgttccgacccagatcccctcataaatccctcttcctaaatgctcagcaaaatgaccgtatatatttttgttaattgttccttttacgatatctgtttgaatcactgcttgatgttcagacatgcctctgatcattcctttcatacggatatgaaaagcaccacagtcaaatatgtgatctgtcttttgcctgaggagtcagcatgaatgtaagcgcttttaaagtaaccatattatatatgttcgtacatgtcaacgacattttctattgtttttatatttgtacgtatgtatttataaatatgaaaaaatcccgaacttttaaagtccgggatttcctttatgagtgtatattcaattgtttgaattcctcagttaataacgggacaacttcaaataaatcaccgacgatgccgtaatccgctattttaaagatatcggcttcggggtctttattgatggcgacgatcaccttgctgtttgacatgccggccaaatgctggatggcgccggaaatgccgcatgcaatgtacaaatccggagtgacgactttcccggtctgcccgatttggagagcgtaatcgcaataatcagcgtcacatgccccgcgagaagccccgactgcggcccctagcacctctgcaagctcctgcagaggctgaaatccctccttgcttttgactcctcggccgcccgcaacgataatttttgcttcggagagatcaacgccgtcagctgtttttttcacgacctcttggataacagtgcggaggtcagtaagagaaacatcaatgcttttgatgctccccgatctgctggtgtctttttctgaagcttgaatgttattggggcgaattgttgcaaagatcatcggatcggttgaaatgacgcgttcaaaagctttccccgagtaaatcggccgtgtgaacacaacattccctccggtaacgcttacatctatagcatcagaaattaagcctgtttgcagccgggcagcaagcttcggtgaaagatccttgcccattgccgtatgcccgaagatgactgaatcaggattttcttgctcgataacacctctcatgacctggctgtacccgtctgccgtgtatgttttcagcttcgggtcctcagcggtaagaactttatctgctccgtaatgaataagctcttgtgcaatgctttgtacattttcaccgatgagaacaccgatgacttccccatctcctgaaatggttcttcctgcagctattgcttcaaaggtgacattccgcaattccccatcgcgtatttctccaagcacgatcactttttttcccattctaacatccccctgtttctttgaatgtccaagctttaaatgactttagcttcgctgcggagcaatgaaacaagctcttttgcctgttcagcaggctcaccttggagaagcttcccggcttcttttttcggcggcagaaaacgttcaatggttttcagctttggttcagcatcctcttcgtccaggtcaagatcatcaagttcaagctcttcaagcggctttttcttagccttcataattcccggaagcgatggatagcgcggctcgtttaagccctgctgagctgtgacaagcaatgggagcgtcgttttgattttttcaacatccccttcgacgtccctttctgcttctgcatcagtgccgttgatttcgagtttggtgatcgtagtgatacacggaatgtccagcagctcggcaagccgaggcgccacttgtcctgatcctccgtcaatggcaacatttccgccgagaatcaaatcaaactcctgatccttcatatagtggtataaaacttgagaaatggaatattggtcgggttcatcaagatcatcttctatgttgattaaaacagcttggtcacaacccatggcaagcgccgtacgcaattctttctccgcttcttcaccgccgaccgtgacagcggtgatcgtgccgccatgcttttccttcagctggatggcttcttctatcgcgtactcatcatatggattaatgatccattccgctccgtcatcctgaatctttcctgtttcaatgacgattttttcttctgtgtcaaacgtccgtttcatcagtacaaatagattcatgatcatatccccttttattcgcctttgaactgaggctttcttttttcgagaaatgcctggatgccttccttggcgtcctctgactcaaatgcttccccaaatcgctttgcttcaagctttaagctgccttcataggaatacaccttgttggaataaagaagttcaagcaaagatgccagcgtttgcgggcttttctctgcaaacttagcggcaagtgcttttgctttttcaatcacttctgcctcatctttcgctccaattgaaacaagtccgagatcaagcgcttcttttccggatatcggttctcctgatccgatgagctccagtgctttggctgtaccgacatatctcggaaggcgctgtgtccccgcaaaacctggaatgataccgagattaagctccgggagccccagcttagcatcttctgccgcgattctgatgtgacaggccattgcaagctccagcccgcctccgagagcagcgccgtgaatcgctgcgataatcggttttggaaaactttcgattctctccattaactgctggccgcgctcagcgagcaatgaggaatcctcattgcctttaagcgatgtaaattctttaatatcagcgccggctgagaaaaatcttccctcgccgtgaatgataatgcttcgtacgcctgcatctgtctcacattgatcaagacaggaagacagctcttctaatatccggcttgaaagcgcgtttgccggcggattgtgaatcgtcaagactgccacaaattgatcaaccgcaagtgaaattgcattcataggacagaactcctttacttattgtgaattccggataccaataattctaaaacgctgtttgaaagcgcaacgagatcgtacttttggtcattcatcacccaagttgtcacagtttcgtcaatcgttccaaaaatcatctgccgggcgaggcggacatcgaggccttcttttatttcgcctgattgtataccttccgtcaaaatgccatccaaaatatttaagtagccttttaatatttcgttgattttttggcgcagctccaagttggattggcggagctcaagctgcgtgacaatcgcgagattatggtcacccgctaaaagggaaaaatgctttgaaatcacaagcgccaatttctctttcgctgttgctttttctttaatgtcctcttccatccgctcaataaattgacccattttttctttgaaaagagaaattaaaatatcttctttgtttttaaaatagagatagatggtgccgtccgctactccggcttgtttggcaattttggatacctgtgactggtggtagccgttttctgcaatgacttctactgctgcatcaataatctgcatatactttggccgtttttgcttcaatgttcatcgttccttcctacagaaatgaatgactattcattcataatttcatgataagaaggattttcaggtttgtcaagtttattcataggcgttctctttttttatttgatatgatgattttcggtttcttcttcaagtaaacgccttcttaaaatttttcccaccgccgttttcggcagctcttttctgaactcataggctttgggcaccttatagggagctagtcgagatctcgcaaaggcatccagttcttctgcatcggcttttgcgcctttctttaatacgacaaatgcttttactgtttctcccctgtaggaatcgggaacgcctgcaacaacaatttcctggatggcttcatgttcataaagcgcttcttctacctcacgcgggtaaatattgtaaccgccggcaatgatgatatccttcttcctgtcagcaatatagaaaaagccttcttcatccatatagcccatgtccccggtgaacagccaaccatctctcagcactgcggcggtttcctctggtttattccagtatcctttcatgacttgcggaccttttacaatgatttctccatgctcatacggagcggcaagctcacccgtctcttcagaatagatcgcagcgtccgtactcggccaaggacagccgatactgcccggcttgttttttccccagataaagttggcgtgcgtcactggggatgcctcagacaaaccatagccttccacaagctttccgccagtcaccttttcaaatttctgctttacctccacggggagcgcggctgatccgctaagacagcttttaatggatgacagatcataatgctgcaattcggggtgatgcaaaaggccaatgtaaattgtcggtgcgccaggaaagagcgtcggtttgtgtttgtcgatgattttcagtgtttcgagcggatcaaacttaggaagaagaatcatttcgaagcctagtttaatcgaatagttcatgactgccgtcagtccgtagacatgaaaaaatggaacgatgcccagcactttttcagcgccttctttcacgtcatacatccaagcggcgcacatttcagtatttgccaaaatattttggtgcgtgagcatgaccccttttggagctccggttgttcctccggtatactggaggacagcgatatcatgctcaggatcgatcttcgggattgtcaggagttcagttttttcctgcttcatactggaagcgaacgtgtgaatgttagctgttttgtcaaagtcgatatgcactttttgtttttgcgtcagcgggtaaagaatattcttcggaaaaggcaaatagtcttttacgctggttatcaaaatctggtcaactattgatagcgttttcatttttattgccttcgggaaaagcaaatctaaggtgatgattacacttacctgagcatctctaagctggtattcaagctcatgctcggtataaagcggattcgtctgcaccacgatgccaccggcaaacaagacgccataataagaaatcactgtttgcgggcaattgggcagcataacagccactctgtctcctttttgcaggccattgcactgcaaaaaagctgcaagtttaagagcatccgtcagaatgtcatgaaaggtgagtttttttccataaaacgatattgcggttttatcagggaatcgtgcggcggagtctgtcaggatggattgcagggttttattcggcaacgggagctcatgcgggatatcgttgggatactcggcaagccacggcttttgagactgcataaaacctccccctttcgattttagagttccaccttatcattatagcagatggacggcaaaaaaaagaaaaagaaaggtaaatctttctttttctcataatatgaacagatatataagaccaattaacaaaaagattcccgccgcggcgagcagtacttttgcaagcttttccatttattctccgtccccttatattccggctgccaccacaaatgaaagcccgacagaaatgacaaatgaaataaagccgacagcccggttatcattttcgatttcctgatcaattttaaaccgcggagtcaaaaactcaaaaataaagtagctgatcagaagcataacaaacccgtaaacgccccagccgatcatttgcagcagcgaattatgctgggagatggaatgctgaaatacgtttgcgatccccaaaatttttccgccggtcgccattgccaccgcaagatttcctttttgaatctcttcccagtttttataagccgtcaccagctcaaacacagtcaaaaagaggacgaggcagagaaccgcgacactgtaatatgccgcgatttccacaagctcgttttcccaaaaatcactcatggccatactcccttttattttagttcaacaaccgtaacgcctgatcctccctcacctgcttcaccgaaacgggaacttttgacgctgcggtggtttttcagaagatcctgtacgccttttcttaaagcgccggttccttttccgtggatgattgacactcttggatatccggctaacaccgcatcatccaagtatttttcaacccggcttagggcattttcatagcgttcgccgcggagatcaagttcaagcgatacgtgatagtcctttcccttgaccgctgtaatgattttttctttttttggctccggagctgatttgataaactccagatctttttcttttactttcatctttaaaataccgatttggacattccattcattgccgcctgttttttcgagcaatgttcctttttgcccgaaagtgaggactttcacctcgtcgccaggcttaaagtcgcgtttttgcgctttcggcttctccggtttcttggacttttcaaaagccggcatagcgccttctaaccgtttcttcgcgttaatcagctcgtgatccttgaaggatttgtgttcttcttttatggagcgcaattcatgaataatgtcctcggcttctttcattgccgcttttactttttcagcagcctgctgttctgcctcttcaagcattttgtcttttttgctgttaagctcgatgatttgctgctgcagctctttatgcagtttttccgcttcttttctgattgattctgtctcagaaagctcttcttccgcacgttttttgctttgttccagcgacgcaatcatcgtatcgacttcgttatgctcggccgtcatttctgacttcgcctgcccgatgatatggtccggaagcccgaggcgttttgaaatttcgaaagcattgcttcgacccggcacaccaattaaaagtttataggtcggtgacagcgtttcgatgtcaaattcaacgctggcattcatgacgccttctctgttatagccgtacgccttcaattccggataatgcgtcgtagctaacactcgtgcattggtgcgatgcacgtcatccaagatgctcatggcgagggccgccccctcctgcggatctgtccctgcaccaagttcatcgaaaagcacaaggctgttttcattgacctgttctaaaatgccgacaatattcaccatatgggatgagaacgtacttaaactttgctcaatcgactgttcatcaccgatatcagcgaatacgtgctcaaatactgccgcttctgacccttcatctgccgggatatgaagacctgactgcgccattaaggttagcaggcctaacgttttaagggtgactgttttccccccggtgtttggccctgtgatgacaatggttgaaaaatcgcggccaagctcgatgtcattggcaacaacttgatcaggcggaagcaatggatggcgggcttttttcaaacggataaagccggtgtcgttcataatcggttttgtcgctttaaccgcttttgcatatctagcttttgcaaaaataaagtcaagcgtctgcagcacttgcaaatctagaaatagttcctctgtatactctgccgttttctctgtcagcacacgcaaaatccgttcaatttcttgcttttctttcactttcgcctgctgaagggaattgttcatatctacaatcgcctgcggttcaatgaatagtgtcgcaccagaggatgaggtgtcgtgcacaattcctccatagctggatctgtactcctgtttgaccgggatcacaaagcggtcattccgaatcgtaacaatcgtatcagacagcattttcgatgcggaagaggaacgcagcatcgactctaaccggtctctgactcttgattcgagtgttctgagctgtgtgcggattcctcttaatgtttccgatgcatgatcaagcacttctccgtgatcatcaatgcaggaattaatgtcccgctctaaatcggacagcgtgataagctgttcagcatgctgatggatcagcggaatgtcgacaccgtcttcagccatttgggtgataaaatgtttcatttgtttaactgcataaagcaggcctgagatttcagtgaattcagaaggactgagaacactgccgatttccgcccgtcttaacgctcctctgatatctacaaggccgccaaatggcgcttggcctctcagccggataatgtcagaagcttcgtctacttcatccagctgttttttgatttcgtctatagaagcagaaggcttaagctcgagaagcatttcttttccgagcgatgaagcggcatgcccaataacctgttctttcactttatgaaattcaagagctgataatactttttgctgcacgattgtgtgagcctccttacttaatcgttgcgcttcagaaatgcctctacgtctttaagcgaccgggcattcagaacgtttttcgtttccgtccatcctttgcgcgcggcagtaacgccagttttcatatcgtctaacatctcaatattatgggcatcagtattaatcaccaatgtaaccccttgttcgtttgctttcattaaatgctctgtgcgcagatcaaggcgcgcagggttggcgttgagttcaagcgccgtatttgttttcctcgcaagctcaatcagctgatcaatatcgatttcgtaaccggcccgtctgccgataaggcgcccggtcggatgtgcgataatgtcaacatgcttgtttgtcagtgccgtctcaagccgtttcataatcacgtgttccggctgattaaaactggaatgaatcgatgcaataacgatatccatttccgcaagcacatcgtcatcataatcgagcgtaccgtcaggcaggatatccatctcaacgcctttcaaaatacggaagttttcaaactctgcattcagcgcgtcaatttcttttgcctgctgcttaagtctttctgcagtaagcccgttggcgacctttaaatattgtgagtgatcggtgatcgccatgtattgatagccttttttgatgcaggcttcagccatctctctgatcgaaaatgcgccatcgctccacgttgagtgcatgtggagatcacctttgatttgcccgagctctatcagttcaatgctgtcgctgtaggtttccacttcctgtccgctttcacgaatttccggcggaatcagcggcaggccgaagtgcgcataaaattcacgttcactcggaaatgttttgatctctccggtttcaactgtctcaacgccgtattcactgatccgctcgccgcgttctttggcgatttggcgcatcttaatattgtgatcctttgatcccgtaaaatgatggagtgttgtcggaaactgctcttccgtcacaagacggaaatcgacgcttgtttcatattcaaaggaaaggatgacggacaccttcgtatctccgcttgcgattacgcttttgatgtttggcagctcaagaagctgctctcttacttcagccggatgatctgtagcaatgatataatccagatccttcaccgtttcccgcgctctgcggagacttccggcacgagaaaatttgatgatatgcgtaaattgagaaagatgctcctcaatttcccgcgcgatccggagggcgtatccgatcgggaaccgttcaggctgttttccggcttccccgagcgcctgtaatattttttcttccgattttttgccgaagcccgcaagaccctggaccttttgctgctcacaggcttccttcagagattctgcatcgtgtacgccgagctctttatacagctttgcgatttttttgccgccgagccccggcagcttcaataaaggcacgagtccttccggcacttctttctgaagcgattcgagcgtgcttgactttccttcatctatatactctttaatgacgctgtacgttccttttccaatgccggacagcgacatcatatcgtccatttctgataagcttcggtcgtcctgttccaaggctgccgccgcttttcggaaggcagatactttaaacgggttgtcccccttgagttccatatagactgcaatggtttcaagcagccggataatatcttttttatgcatatcataaccccagacgttcacatatgtttccatcatacttgaaaaaaacttctccggacaagagaagtttttttatgccccgtactgtgtccacagctcttgtaaaagccctgacaagtacggtgtatggttaatgatcacatttgcgagagacgattgtcccatcatttgctgcaacgcatctaccggcagaacggatgcgacatacagcagcacaaatgtaaataaatagacttctagaaaaccgagaacggctcccagcatctggttgatttgtttaatcaccggaatgccggctacaatactcaggaacgagccgatgattctcagtaagattttagcaatgataaataaaacgataaacgcaatcgcattatagtacgctgcttccaaattccccgtaaaaaaagaaagagccggctgtcccgctgaaaaatcgggtgcgggaatccaatgtaaatgcggtgccacgtttttatagaataaagccgcaaaggcaattgataaaataaagctcgtcaagcggataaactgcaggataaaaccgcgttttaaccccagtaaagtccccatcaggagcaagattaagatgatgatatcaagcatagttgttcaatccttttctttaagctgacgctccagtttttcacatttctcttgtaatttgacataatcgtgcaccacatttaccgctgtcagcactgcaagtttatttatatcaaggtatggatttttttcattgatttctctcattttatcatcaacaattccggcgacatacctcatatgggctctgctttcttcaccgacaatcgtgaagtgctggccgtaaatgtcaacggttgtttttgtttttttgccgtcagacaacgtttctcctccattccgcgagaatcctagttcttatcataacacgtttattaaatgaatggaaagacgagcctcccgctgttatgatacactggtatatacagcgaaaagtgtaaaaaaaggagattattacgtgtcccattcagtgataaaagtatcgttgtctgctattgaccaaatgaaaatgacgtacagcggttcacttacagcctctgttccgcagggagccgtttttcaggcaaaaccgcccggctgtaccattacagcatataaatcaggcaaggtcttgtttcaaggaaaaaacgctgcggcagaatccgcgcgctggggaacagcagagcctcaggaaaagaagaaaacggccaaaaagccggctgatccccgctatgcccctccggcagatatcgccggaatgtctgttatcggttctgacgaagtcggaaccggagattactttggcccaatgacggttgtatgcgcgtacgtcgacaaaaccatgcttcctttaatgaaggaactcggtgttaaggattctaaagatttaaaagatccgcaaatcatcgagattgcccgaaacctgatcaaaactattccatatagcctgctggttttaaaaaatgaaaagtataacagcatgcaggaaaaaggcatgagccaagggaaaatgaaagctttgctgcacaatcaggcgatcacacatttattaagaaaattggatggagtaaagcctgaagccattttgattgaccaattcgctgagccaggcgtctacttcaatcatttaaagggcagagacattgtgaaggagcggacctattttagcacaaaagctgaaggtattcacctggctgtcgctgctgcttcaatcattgcaagatattcatttttaatggaaatggataaactatcacgcgcggcaggaatgacgcttccaaaaggggccggtccgcacgtcgatgaagcggccgccaagctgatcctcaaaaaaggggcatctgcactcagaacctttacaaaactccatttcgccaatacgcaaaaagcgcagcgccttgctgataaaaaacgttcatagaaaaaagcttgcagatttctctgcaagcttttttctcagcctcttaaaacagcttgatatgtgtcttctaacgctttcagcactttgctgtgcgcctttgtcacttcttcttcagtcagtgtttgttcagggttgacatactggagtgagaaagcgactgacttcttgccttcctccatatgttcgccttcgtatacgtcaaagacggttacctctttcagaagcttgccgccagcctctttaatgacgctctcgagctgtccgcttgtaacggttttatctgttacaagggcgatatcacgtgtcacagacggatatttcggaatcgccgtgtaaacaagcggtgctgtttctgctgcgagcaacgcatgaagatcgagctcaaatacgtatgtttcctttatatccagttctttttccaatgaagggtggacttggccgatgaagccgatcagagaaccattcaataaaatgttcgctgttctgcccggatgcagctgtttgcgttcagactgtacaaattcaatgctgtctaggacgttgagtttgtctaacagcccttccacaattcctttgacaacaaagaaatcaactggtttcttttcaccctgccatagctgcttgcgccataatccggtaacagctcctgctacgcgttctgtttcaacaggttttgtgtcctcttccttcgttaggaaaacggagccaacttcgtacagtgcaactgagtcagtctgcctcgcaaggttgtaagaaacagaatcaagcagattcggaacaagactgtgtctgagaatgcttctttcttcactcattggaagcgcaagcacagtattcagtgatttttcaatcgcaaacgctgccgctttcttctcgtttgtcagtgagtaagtgatggcctgtgataagcctgcgccttcaaggaagcgtctgactttacggcgttttgcctgatatggcgttaatccgcctgtagttcccgctgtctcaggaagcgtagacggaatgttatcgtagccgtacagtcttgccgcttcttcaattaaatcctcttctattgtaatgtcgccgcggcgtgatgggacagtcacaacgagaagttcatccgcttcaccgaccgtaaaaccgagacgtttataaatgctgatcagttcttctttactgatcgtcaggcctagaacgctgctcactttgtcagcagatacgtgaatgttatttgcttcgattgtcaggtgatcttcctcaactgttccagcaagcacctcaccgccggcatacagatggatcatctgcgcagcccgttctgctgcaagacgtacgcgcgccggatcaattcctttttcaaatcttacgcttgattcacttctcaaaccaaggtctttggaagccttgcgaaccgtctgcccattgaaatacgcagcctcaagcaaaatcgttttcgtatcttcctgaacctctgactctgctcctcccatgacacccgcaacggcctgcgctttcgttccgtttgtaatgacaaggtgatcggcggacagcttacgttcttgatcatcaagagttacgatcatttcattctcagctgcttttcttactacgacttccttagagccaaatctgtcataatcaaacgcatgaagcggctgtccgtattccaacaggacaaaatttgtgatgtcaacgacgttgttgtgcggacgaatgcctgcattcatcagctttgtctgcatccaaagcggtgacggagcaatcgtgacatttttaatgatttttgcagtgtacagcgggttcgcttcttgatcttcaattttgactgaaatgtaatcagacgcttgttctgaagcagccgggtaatccgtttgcggaagctttacctcagtgtctaaaatcgcggcaacctcgtaagcaacaccaagcatgttcatggcatccgcgcggtttggcgttaaacccagctcaagaatcgcatcgtcaagctgtaaagccgctaaggcatcgcttcctgtttcagcgtcattagggaatacgaaaatgccttctgcatactccttcgccacaagtttgctttcgataccaagctcctgtaaggaacagatcatgccatttgattcttcaccgcgaagcttggcttttttgattttgaaattgcccggcagcaccgctccgactgttgcaactgcgactttttgtcccttatccacattcggcgcgccgcaaatgatttgtacaggggcttcagctccgatatccacaaggcacttattcagcttatcagcattcgggtgctgctcgcgctccagcacatggccgatgacaacacctttgatgccttctcctttgtattcaattccttcaacctcaataccggctcttgtaattttttcagcaagaacagccgggtccatgccttttaaatcaacataatcctctaaccatttataagaaacaaacatccttgcatcctcctcttacgcctgtttaaactgcgaaataaatctgacatcgtttgtatagaagtggcggatatcatcaatgccgtatttcagcatcgcgatgcgctcaacacccattccgaatgcgaagccctgatattccttcggatcaaagccagccattttaagcacgttcgggtgaaccattccggcaccgaggatttcaatccagcctgttcctttacatactgagcagccgttcccaccacatttaaagcatgtcacatccacttctactgaaggctcagtaaacgggaagaagcttgggcggagtctgatttcgcggtcttgtccgaacatttttttcgcaacaagttcaagcgttccttttaaatcactcatgctgatgtttttgtcaacgacaagcccttcaatttgcataaattggtgagagtgcgtcgcatcatcgttatcacggcgatatactttacccgggcaaatgattttaacgggacctttgccttcatgcttttccatcgtccgtgtttggacaggggaagtttgcgttctcatcaaagtctcctctgtgatgtaaaagctgtcctgcatatcgcgcgcagggtgttctttcggaagattgagcgattcgaagttgtaataatccgtttcaacctctggcccttcctcgactgtgtagcccataccgataaataaatcttcaatttcttcaatgacaacagtgagcggatggcggccgccgactgcaacagggttccccggcagcgtgacgtcaattgtctgtcctgcaagcttctgtttcatttcctcttcttcaagcttctcgtttttgtcagcaatcgcattggcaatacgctcccttacttcgttcgcgagcgcccccatttttggacgttcctcagcagaaagcttgcccattccgcgcagcacttctgtaatcggccctttttttccgagatattgcacccgaatatcattgacaatcttcaatgagcttgccgcttctacttgttctaaagcttcttgttccagctgttttagcttttcttccattttgcatcctccttttatgtaaacaaaccgtcatatgtctttggaaaataaaaaaaacccgtcccttttacaagggacgagttgtggccgcggtaccacccttatttcagacagactgatgctgtcgtcagcttcattgacataacggaatcagattccggttcacctttacgcgcagtgtacgcggtcccggcgacaactcaagaggtgaagccaatttccggctgcgttaaaaatgctctcagtcagcggcattttctccctggaaagcagttgatcagaaattgaggtcctctgtcacggtttttgaaatattatgttctattatagagaaatccaacgcttggcgcaacactatcctcgcaagtgatacacgaggatggcagccgcaaccgcaacgtttagtgattcagcctgtccgtaaagcggcacgtacaggttcaaatccgttttttccagcaatgcagcatccacccctgcaccttcatttcctacaatgagcgcaaaggattcagactgaggaatctcctggtaaggcgctccgttttgcagcgccgtgccgtatacttttacgccctctgccttcaattcgtccacatatgaaggcaggtttcttctcacaacaggaatatggaagtgagatccttgagcagatcgcagtgtttttccgttaaaggcgtccgccgtgccgtcaccgagtacaaccgcatccaaaccggccgcatcagccgttcgaatcattgtgccaaggtttcccggatcttgaacagcgtcaatcagcagcaccttgcgtgccgttgccagcttttcttcaggcatatggcacacagcggcaatctgctgcggcgtttcggtttcagtcacagctgaaaacgcatcttcactcagcatatagcactggataccagtctcaagatctgaaggaatcttcgtttcatcctttacaaggatttctttcacaatgcccgggcttttcaacgcctcttcaacgaggtgttctccctctatcagaaatgtatttgtttttgttcgttctttttttgtgtgaagctttttccaatccttcactttttggttttttgccgattctatttgtttcactgtctatgtggcgctcctttttttaacatgatgttattatatcgcaagaacagcacataataaaccaggtgcagggttagaatatacgtattacattttagaaaaaggagcgttttacatggatcttaatttacgtcatgccgtcatctccaatgtcaccggcaataatcaggagcagcttgagcatacaatcgtagatgcgattcaaagcggtgaagaaaaaatgcttccagggctcggcgttttattcgaagtcatttggcagcacgcatccgaaagtgagaaaaacgaaatgctgaaaacgcttgaaggcggattaaaacccgccgaataagacatgaaaccgggtgacagcgcccggtttttttcttatataataaaaacatgatgagggggaacgccatgtttttacagccgttattagcgaaaaaaattattgctgaagtaaaaaaaatgtacgaacgtgaagtcattattgtaaacacggacggtcttattatggcaggcacaaacgatgaacgtgtcggacaatttcatgagggagcgcttatctgcgcaaaagaaagacgcagcgtgattattacaaaagaagatgaaacaagattaaaaggagtgaaagcaggcataaacctccctgtattttttgaccatgatgtgatcgccgtcttcgggctgacaggtgagcctgcagagattcagccattcggagaactgcttcgaaaaatgacagagctgttcattaaggaatcacggcatttagagcaatcccagtggcgtgagagaatgctggagtcctttatgatcgattggctgcaactaaaggagtggtctcccagttttcttgagaaagctcagcttcttggtgttaacctttcctcccggcgccaaatgattcttattcaggggtatgagtggtcacgtcatgatattgaacaaatggcacgcagctggaaatcctcgtaccctgcggatttgttcatcaggtggggaaatgaacggatcttgattaatcatgaagtgccgcagcatgaacaaagggatcggcttttacggaagatccttcacatttgttcgtttgccaataccgcaaacagccaatttgcagcagctggcgccggaagggctgtcgcaagctccagcctgacagattcatacgagcaagcggaaaaagcgctggctgtcagccttaagcgaaaaacgcccatatttgaagaggatctgaagcttgatatgtgtctgacggagatcagcccgggaacccgaaacgaatttccgcaaagagtattaggagaggcgctagagcatcaggaacttatgaatacgttacggactttctttcatcacgatttgtctttgaaacaaaccgcagaagatatgcatattcatatcaatacattgcgttatcgtctggctaaggctgaacagctgacgggtttacgttttgaccgtaccgaggacgtcgtcacgatgtacgtcgcactctattttttagatcaagatacaaaatagagagagtttcagtttcattttttgtatgtttctccatggaaggctttgctttttttcttttacaatagattgaaagcattttttgacagggggatgggtgaaatgatcaccaaggatgtaaaggaacagctgattcaggtctccggaccagaaaactttgatgactcgaatgccggccgtctcgtctattcatatgatgcgacgcctcagtatcagtctatgcctgatgccgtgattgctccgaggaatactgatgaagtatcacgcattttaacaatttgcagcgaacatcgagtgccgatcgttccaagaggatcagggacaaacctgtgcggcggcacgtgcccgactgaaggcggacttgtgcttctctttaagcacatgaaccagattcttgaaattgatgaagaaaatttaactgccacagttcagccgggcgtcattacgctggatatgatccgcgcggttgaaagcaaaggtttgttttatccgcctgacccgagttctatgaaaatatcaaccatgggcggaaacatcaatgaaaattccggcgggctccgcggattaaaatacggcgtcacccgcgactatgttattggactggaggttgtgctcgcaaatggtgacatcatccgcaccgggggaaaactcgcaaaggatgtggccggatacgatctcacacgtctttttgtcggctcagaaggaacactcggcattgtgaccgaagccatcgtcaaacttgttccaaagccggaaacaaagaagacgttgcttgctctttatgaaaacatcgatgccgctgctcaaacggtatcggacattattgccgcaaaaattatacccgccacgcttgaatttctcgaccagcctacacttttggtgattgaggattatgccaaaatcggacttccgacaagcgcaaaagcagttctgttaattgaacaagacgggccatttgaaactgttgaacgggatatggaaaagattgaggcgatctgcaaaaaaggcgacgccgtttccgttcagaccgcacaaacagaggaggaagcgtttgccctgactgaagcccggcgttctgcactttctgccctagcccgcctcaaaccgacgacgattttagaggatgcgaccgttcctcgctcagaaatcgccaatatggttaaagcgattaatgatattgctgctaaatatgatatttccatctgcacctttggtcatgcgggagacgggaaccttcacccgacatgcacgacagacataagaaataaggatgaaatggaacgtgtcgaacaggcttttgccgagatttttgagaaagcgattgaacttggcgggacgataaccggagagcacggagtcggggaaatgaaagcgccttacttggaaatgaagctgaaaaaagaaggcattgatgcgatgaaagcgttgaaagcggcatttgacccccggaacatattaaatcccggcaaaatgtttgcgaaagatgccagaaaacgtgtggtggcggaaagatgacaacagaaaaagaaatgaaacagatccaaaatgaatttaaagagcgtatggatgaaggagagttattaaattgtatgcgctgcggcttctgtcttccttcctgtccgacctatatcgaatcgggatttcaggaaacacactctccgcgtgggcgcatcgccttaatgaaagccgtagccgacggtatgattgaaccggatgaagatgtcgaacggtcgctgtcactttgcctcggctgccgcgcctgtgagcctgtatgcccgtctggcgtgaaatacgggcagctgcttgaggaagccagagatattatccaccaaaataaaaaacactctcttggtgaacgtgtcatgcgaaagacggcttttcacgagctgtttccgcatcaaaaccgcatgcgctcagctgtaagccttatcggtttgtatcagcgttcaggactgcaaaccgctgtgcgaaaatcaggcatgcttcggatcctgcctgagcatttgcggacgatggaagctgttcttcctgatgttccaaaaagcaaagacatgaaacatcggccgcgtttcctgccgtccattggccccatgaaaaaacgggtcgcctttttttcgggctgcttaatggatacgatgtttttaccgactaacaatgccacattgaagcttttacagctggcaggctgcgacattgtcatcccgcctgaacaggcttgctgcggggcgcttcatggacacagcggtgaaaaaaacacagggaaagagctcgcgaaacaaaatatcgctgctttcgaagcattagacgtggatgcagtcattacaaacgcaggaggatgcggagcctttctgaccgaatatgatcatttgctgaaggatgacccggaatggtcggagcgggccgccgcttttgttcaaaagctaaaggatttttcttccgttttggttgaacttgatttccatcaaatggacttagcgctcgagacgcctcaggtcgttacctaccaagattcatgccaccttagaaatgtaatgcatacgtcgcttgagccccgccagcttcttaaaagcatcaaaggggctgaattcaaagaaatggagaaagcagacagctgctgcgggtcagcgggaatttacaacatcgtcgaagctgaaatgtctatgagaatactggacagcaaaatggctgccgttaaagcaaccgaagcgattctcattgtaacagcaaatcccggctgcctgctgcagatgaagctcggcattgaacgcgaaggactaagcggtaaagtcagagccgttcacctggctgatttgctattggaagcagccgggcacaaaacatcatgagaaagcccaaaacagatattgttttgggcttttgtgcgttattccatcggactgcaaatttcgatataatgtccatccggatcagcgatataggcgaccgtctgcccccatggtttcactttcggctccccgataatcgatacgccttgttctctcatccttttgatgaccgcttctacattttcagtaacaaacccgatttcaaatgtgtttgaagcagatgtatccggaatgtccagcgccgtgatgtctctggcgctttcccgcgtattaagcgccaatatcgtagaccctgtttcaaattcgacatacgtgccgtgttcagcacgaatcggcagtcctaaaatatcccggtaaaaatgaatagcccgctggctgtccgatacgtatagaataagatatttcattgatagattcattgccaacccccctcagcatttttcaatagtccttctagcccggtatagatgcttccatccttaagctcggatctttccacatctgcgcccattttttcacagccgccacgataatgatgaagcctaacaccagcatgatgatagataatacgccattcaatacactatatcctgctgcttcaggattgagatacacattgcgcaccatccaatagcccgcataattgacagtgacatataaataggcaagcgggataaggcaagtcagaatgtaccggcgtttatcagcgattttcagcacgatcgtcgctccgataatcagccccactgaagccatcagctgattagaaacgccgaacagcgcccaaatggaaccgatatctcctgaatacagcaagtacccccacatcaaacaggcaagcgcgctggcaaatacagagcccggaatccagtctgttttcttcagcggtttatacacctccccgaagaaatcctggatcaaataacgggcaacgcgtgtgccggcgtcaatcgctgttaaaataaagaccgcttcaaacataatgacaaattggaaaaagtatgaggccaaatggctgaaaaacggcattccggtaaaaatataagtcatccccaccgcaagcgtgacggctccccctgttcttccttctaagtccaaaccgatttccccgctcaattcaggcaaatgtacgacattcatgccaagcgtacggaaaacctcaggcgtgctgttaatcgcaaagtaatcagcaggctgtaaagcggtcgctgcaatcagcgccatgatgccgacaagacactcaacaagcattgcgccaaacgcaaccggcttcatatcactccatttattcagcattttcggtgtcgttcctgagccgacaaaggcatggaacccagagatcgccccgcaggcgatggttattgagatgaacggccagacaggtcctgccagcaccggcccgccgccttttacgaattctgtaaacgcaggaaacggaatagacggattgacgacaaacacaccaacaatcaaagcgataaaaacaccgattttcataaagctgcttaaataatcacgcggtgcaagaagcagccaaacgggaagcgcagccgcaaaaaacgcataaacaggaagcgcgattgcaagcgttttcgtatctagcgttaaaaagtcaccgagcgcggtagtctgtacccatggaccaataaagactcctgccattaaaaagagaaagccgaccgttgaagcgagctttaaatttcccgttttcttataaaataagcccacacccatcgcaatcggaatcgtaatccctaccgcaaatgttccccatggattacgttcaagcgcatgcaagacaaccatcgacaggcccgccattgtgatcgtgatgataaacagcatggacagtcctgtacaaaatcctgcaacagggccaagctcatccttcgccacttccgacagcgattttccgtttttgcgcatcgatgcaaacaacaccacaatatcatggacggctcccccaattaccgccccgattaacagccacaataatcccggcaaatagccaaactgcgccgccagaattggtccgaccagcggcccggccgctgcgatcgcggcaaagtggtggccgaacgaaacccatttatttgtaggcacatagtctttcccatcctcaagcgcatgagcaggtgttggcttgtcatcattcactttgagaaccttcaccatcataaatgttccgtataaacgataggcaatagccaaaatacacattgatgctatcacaattgtaaccgcattcattttctcccatcccctttgctgtttttcataaatatatcacaatttcatggtgaaaagcggtcattttttcctatacaaaaagccggcttgaacgggccggctcgtggcagttgaaagacaagccggagatttctctccggctttgctattcttatgactgttttttcaggcggatcacattccaggaaagcggcgtgaaatgagcagttaagccgttttcgctgacagacgatgatccgttggaatgcggaacgacattttttctgttatgctggtttgtcgctttgatatcctgatgctcaagtacgatgtgctctgcgatttggtaagattcaaagcctctgagcgaaatctccgtctccatctgatcctcagccttgtttaccgcaaaaatagtgagggtttcttcctcttcagagtacacaacagcagcatcaacatatggcacatcagtgaaatcagaacaatcgtacttaggagaagaaataagcggtttcagtgactcgccccttccgtaaacagaagcatgcatgtatggatagaaaatcggctgtctccatgcttctccgcctttttccgtcatgatcggcgcgatgacattgacaagctgtgcaagacacgcaattttcacacggtctgcgtgctgcagcatcgtaatgagcagagagccgactaataaggcatcttcaaaattgtaaatatcctctaaaatcggacgcgcagtgatccacggctcgacttttttatcagcctcatttgagtggtaccatacgttccattcatccagagagagattgatagttttcttgctgcgtgtttttgcttttacatagtcacaggtcgcagcgactgatttgataaaatgatccaaatccatggaacgggccaagtagtttggcagattgttatcccggtttccgtagtaggtgtgaagagagatatagtcgacatgctcatacgtatgctccagcaccttcgcttcccaatcgataaaggtcggcatgccgctgtttgagctgccgcaggcaacgagttcaattgatggatcaacccatttcatgacctttgccgtctctgcggctagccgtccgtattcatcagctgttttgtggccgatctgccacggtccatccatttcgtttcctaagcaccatgttttaatgccgtacggctgttcatagccatgcgatcttcttaaatcactccagtaagagcctttcgggtggttgcagtattcaacgagattacgggcggcatctatgcctcttgtgccgaggttgacggccatattgacctcagtgttcacctttttggcccaagataaaaattcatttgttcccacttcattggtttctgtcgtttgccatgccaagtcaagccttctcgggcggttttcgactggtccgacaccgtcctcccagttgtatccggataaaaagtttccgcccggatagcggatgatgggaacctgtaattctttgatcagcgactgaacatcttttctaaacccatcttcatccgcttcagggtgatcaggctcgtatatgccttcatataccgcacgacccatatgttcgataaacgagccataaatccgtttatctacttcaccgattttatattctttgtctacaatcattcgcgcttttttcatcacacgtttcctccttcattaacctttgactccccctaccgtcaggccggagataaagtacttttggaaaaacaagaaaatgataatcaccggcaaaatcgcaaatactgagccggatataagcatgtcgtaattatttccataagggctcagcaagctggacagccctattggaagcgtaaacatttctttcgaccgaagcacaatcagcggccacaagaagttgttccagctgtttaaggactgaaggataatcatcgcaccgaaagccggtttcatcagcggtgccataatcctgaaaaagatgccgaattccgtacagccgtccatccttgcagagtccagcagatctcttggaaggccaagagcatattgcctaaaaaagaaaacggcaacaggtgaaacgataaacggcaatatgacacctgtatatgaatcgatcaagtgcagtccgacggtaagcttaaacagaggaagcatcatcacttccagcggaaccatcatgataatcagcacaagaacaaagatgatatttctgcccttaaaatcataaaccgcaagcccgtacccgatcatcgaagaaaaaaacagggtgagcacggttgtgaaaagcccaagtacaagactgttaaaaaaccatttgaaataaatgcttccgccgttaaacagaaatgtataattatcaagactcattactttaggatcaatgtcgagattgagccccacacgcaaaagctcagatgacggctttaatgatcctaaaagcaaacagaaaatcggaaaaagatacaataggctcagcatcataaaaaacagggttagtgcgattctgtaaacgctgaactgaggactgtgccgcaacatttatccctcccccttaaacgagcctgacagctttaatgaaatcaggctgacaacaaggatcacaatcaaaagcacgatgccgatggctgctccgtaccccatttcgttgtaggcaagcccctgctgatacaaatatccgacaagcgtcagaccaatattacccggggaattattctgccaaaggacgtagctttcctcaaacatcctgaagccgccgatgatgctgatggtcagcacatatacggttacaggcttgagaaacggcagcgtgatgtgcagaaattttttcattgtattcgcgccgtctatatcagcggcttcgtacagctctttcggcacattttgcaaaccggctaaaaagtaaaggatgttgattcccatccatctccatgaagcaagcagcaccatcaaaaacatgccggtatgttcattgttcatccagttctgaggtgaaaagccgagtttgagtaggatggaattggccagagacgtttccatttctccgaagatcagccgaaaaatgatccccgcgacaatggttgaggtcaatgccgggataaataatgctgatttaaatatatttctaaatttgaccagctttgaattcaggaatatggccagaagcaatggaacaggaatcagcacgatcagcgtccaaaaggtgtattccagcgtattccaaagggcggtatagaacgtcgggttgtttagcgctgtataattagacaatccgacaaaggacacctctcccggcaaaattctttggaagctcatgatgaagacactaatgatggggtatagaaaaaatacgagaaaggataaaacgaatggcgctgtaaacagatagggcgccgctttttttgaataaaacagatctcgccagcctgattgtttcgcagctgaaggaacgggatgaaccgttcctgttttcacaggtttcatgagaacctccccgctttcactttttgaatgggattctatttctgtttcagttcacctgccgctctgtccaaggcttgtttaggcgttttttgctgagatttaagtgcgtcgaacaacacgcttctgttgacaaggtctgaagccttggcaaaatcctcatgtaaataaatcggattgatttcatccttgatatcgagcagcacagaaaaaatgcctgttccgttttggaagtaatccgtgtatttgtttttctctttcaattccttggagctccaaacatcccagcgaagcgggtcaaagccgagtacgctccagagttttttatttccttcttcagagcccttcgcaaaggccaaaaactcttttgctaactcaacatgcttggattgcttcggcacaacggttgccgtaccgcccaagcctgccgagcggtcgcccccctctttccatgccgggagcggcctgatggcaatcttccctttcagatcaggcatataatcgataaatcttcccatataccaaatcggcatgaggactgaagcagctcctccttggttcataaagccgtagtattcttcactgtgatgcccgccgcccggcgcaggaatcatcgttttatcattgatcatgtcttttaaatattgaagtgtttttacgttggtgtcattattgaggatcagcttgccgtttttatcaaaatagcctgagttttgctgtgaaatcatagataagaacgttgcggaatcatttgtttccaccgttcccatcggcttcccggtcactttgcgcactttctgtccggctttatggtaatcatcccatgttttaatatcgtcaggattgacgccggcttttttcatcacatccatgttataaaacatgaccgttgttcctacatgcgtatcgagtccgtaaagcttgccgtttttgctgtacagggtcagccgcgcctcaacgaatttatcgcggtccttttcaatcagcggagtcaagtcggcaagcggtatgtcagagcccttcaaaaagtttgaaaaacgggccaattcgacatcggcaatatcagggacgccttctcctgcaattaaggagatagacaagttatcgtgcatttgtccatacggataaacgaccgtattcagcttaattttgcggtcaggatatttttcattccattccttcaccatttctacatagaactgctcatgaagtccgttaaatgtccaaaaggtcagctcggtttcacccgacttcccggatgatctttctgctgaacacccagcaatgactaatgtcaatgtcagcaacatcatgagcacaagaaaacagacagtcatttttttcatctgcgttaccccttccattcgaggtgcgggctattcatatagaccatggttgatcagcgttttgttttcattgatgattcttaatccggtgcagcggtctcttaaggtgtgcgcgtgtctgaaggcattcttgacggaatcctgcccgacaccgatttcgtcaaaatacgcagggcctccggctgatctcagccaatcagccagcacttctccttccgggagagtttgataagccgattggatggcttgccgccggctcggtgaaaattcgttcagcccgtcatccttagcgagctttctgtatgtgtcagttaataaaacagctgcacagcccacctttgccccatgaagaatctgtggccgttttttctccattaattccatctcaatccaatgtgaaatatgatgctcgccgcctgatgccggtcgggaatgatctaatgccagcatgacaagccccgatacaagtaaagactccatcaaaacccgtatgccagtttccgttttcatcgcaatgtcttctgtgtgttcaatgcaggcagcaagcgcctcctgaacaatcttagctcctgctggcgaataaggctcgccggcaagatgccgggatatttcccaatctgctaaagacgttattttaccgagcatgtcaccaaagccagctgccaccattgactgcggtgccgcttttaatagatccagatcagcgaacagtgcagatggggccttcgtttgaatggttgttttcgtgccatataaaataatcggcgcaccggctgatgtaaaaccgtctacagatggagcagtcggataagaaataaacggcaaatctctttgaaacgccgcaaagcggacgatatcatgaatcgtgcccgaaccgactgcgatcatgacatccgttggttgtttcgtatggatcagcacatgaatgagcgatcgttcatcagctgtcacatctccggcttcattttctggaatgatcaggcactcggcctgaaatccttcttgattcagctgattttccagatcaattcctgcaatgcggtgtgtattcgcatcgcagacaaggacaatatgtttattgtttttttgttttacgtaattcaaaagcgaatcagctgcttgtttaccgagaacaatttcttcaacttttataggcaacgtcttttctccggcgtgttcaaaagcacgctgaacgtcagctgcgatacgattcatatcagaatcccctcctcagccaatttggttacatccttaatagaatccagcacataatccggcgtgtacaaacgctgttcgccctgtttcgcagaaccagttagcactaaggcgcttttcatgccataaagcttccccatcgcaatgtcagattcaatgctgtctcctataatcatgcattcatgtgcggacagccccattgctgtacaggcagcctccgccatcagccatgacggttttccgacaacaagttcagtcttcgcttgtgcggaagcctctatcgccccaatcattccagccacatcaatggcatttccgtcttcgttcggaaaagagcggtctttgtttgtagcgataatacgagcgccgccggcagccgcttgaaaggcttgatttaaatcgtcgtacgtgagcgtttcatgaagggagatcacgagccaatccgcttccttcggttcgttcgcgttctgcacaccggccagcctcagctcgtcaaccaagccttgttccccaagcacccatacctttgaaaaacgataatgttttttcagaaaagccgctgtcacgcttgatgacagaacaatgtcgtttacgtccgtttcaatccccgcgccaagaagtttttttctgcacatggcacgggagatattcccccggttgcttaaaaagacgattttctttcccattctcctaagcgttttgatcgcttctcttgctccttcgatcaactcatttcctctgaatacagtaccgtccaagtcaatcagaatgccagccggtgacacaggcgtatcatgactggccataatacgcatttgctccgtgttttcgataaaaatgcttttcatgcaggactgtattgattggggttacatccttgttcagcataatggagtgataggccatttcggcaaccgtttctaatacaactgcgttatgaatggcatttaaggcgtcagtgccccagcagaacggtccgtgattattcacgagcacacccggcacctgttcgtagttatgatgctgaaaggtttccgctatgacttttcctgtattcagttcgtagtcatgaatgatttcttcatcgtacatttcacgagtacatggaatcgcactgtcaaaataatcagcatgggtcgtgcctaacggagggatgtctctgcccgattgtgcccagcttgtcgcccattgagaatgggtatggacaattcccccgatattcggaaaggctttatataaataaacatgggtaggtgtatctgaagaaggcttaagcgagccttcgacgacctctccatcaaggttcaaaacaaccaagtcatcggctgtcaggtcgctgtattcgactccgctaggtttgatgacaattctttctttttcacggtcaatgccgctgacatttccccacgtaaaggttaccagctgatgctcttgaagcttcaggttggcagccagcacttctttttttaatgtttcaagcatgctccatcaccctttatcaattctttttggcggcagatgaaaattgaagatttttgatcgttttcagacgtttcatgacatggttttcttttccgaaataatgaaccagctctttatattcagcgtacaatttttcataaaccgcggcgttttcggcatttggcgtataagttatatctttcagttttcccatgttcgccgctgcctctttgatgtcatcgtagccgcctttttctttgcctgctgcaagcgcgccgaaaatggcagatcctaaggctggtgcttgcggtgaaccagagattttaatgtccatgtttgtcacatccgcataaatctgcatgacaaacgggtttttctcagctattccgccggctgcgtatagttcctcaatcggaacaccgctttctttgaatgtttcgataatcattcgggttccgtaagctgtcgcttcaactaacgctctataaatctcttcaggcttcgtcagcagtgtcatgccaagcagcatccctgttaaatctgcatcaacaagagttgaacggtttccattccaccaatctaaagcaagcaagccgctttcaccaggcgcttgatggtttgctttctcactcagcagctcatgaacgccaatgtttttttcctttgcttcctcttgataagctggcgggacacatgttttcacaaaccagtcaaaatgatcgccgacacaggactgcccggcttcatatcccgcatagcccgggagaattccgttgtccacaacgccgcacattcctggaacgatatgcacctcttcaccaagtagaacatggcacgtcgaggttcccataatcatcagcattttccctggctctgtaatgccgaccgccggtacggaaacatgagcgtccacattggcaaccgcaacagccgttcccgggagaagtccggtcagctttgccattttttcagtcagactgccggctttttctcctactgaatgaatagaacctgacaatttgtcttttgtaatcgttttcattgaaggatttaatttctcaaagaaatcatctgacggataccccgctttttcactccacatcgctttataccctgcggtacaattgcttcgcttgagcgagccgcacagctggtacacgatccagtccgcagcctcgatgatccggtcagccgcttcataaatgtgaggcgcttcctcggcaatttgcatgacctttggaatcatccattctgatgaaatttttcctccgtaccgctgtaaaaaagcctctccttcttcttccgcgatttgattgagccgatcagcatgtttttgggccgcatgatgcttccagagcttcacatagctgtgcggctcctcttcatattcaggcagcatgcataacggctgcccgctgctgtcaataggaaggatcgtacatgccgtgaaatcaattccaatcccgataatgtctttcggttcaacgcccgtctgttcgagtaaagacggaatggttgtttccaagacttcgaggtaatcagcagggtgctgcagcgcccagtcgcgcggcagcttttgacccgtttttggaaggacggtatcaatgacagcatgcctgtattcttttacagcagccgcaagttcctcccctgtttggacatgaacgagcaccgctcttcctgataaagttccaaaatcaacccctattgtgtaagccatgtgacatccccctctacttttgaagccggtaaagcgcctcgttccattttaactcgtgtttcagtttatgaattgtcgtatcacgggaaatgagaacactttcgatccccgccatttccgcccaatcaagcatttgctccgctgtcagttcataagacaggcaggtatgatgtgcaccgccggctaaaatccatgcctccgctgctgttttcaatgacggctccggcttccagagaacacgggcaaccggtaaattcggcatgtctttttcaatttcctggccggtgacttcattcagcacaaggcggaaacgcccgccaatatcaacaatgctagcttgaatggcagaacccctgatgccgttaaatacaaaacgcgcagggtcctctttgccgccaatcgaaagcggatgaacctcgattttcggctgatccaaagcgacagtcggacacacttcaagcatgtgagagcccagaatcatttcatttcccggttcaaaatggtacgtgtaatcttccatgaaggaagttctttttcctttagccatgattttcatcatccgtacaagggccgctgtcttccaatctccttcaccggcaaacccatagcctttctccatcaggcgctgaacggcaagtcccggcagctgtttcattccgtgcagcacttcaaacgatgtcgtaaacgctgtgtatccgccttgctcaagaaaagcggttaagccaagttcaattttcgcctgttctttaatggacgctacctttgcttcgtcacgttttgtttcctcactgatcacatatagtctgtcatactcggcataaagcgtgtcaacctcgtcgtccgtaatgcggtccatcacttcaacgagatccccgatgccatatccgtcaacctgccagccaaattgaatatgcgctcccaccttgtctccgtccgttaccgcgacatgacgcatgttatctccaaatctggcaaccttaatatgtctgctttcatttaatgcagccgccgtatccatccactgggacatttcttttttcacttcttcatcatcccaatagccggcaatgacttttcggctaagccccattctcgagttgatgtaaccgtactctcgatcgccatgcgcggattggttgctgttcataaaatccatgtcaatcgtaccccacgggatatcgcgattatattgggtatgcaaatgcataagcggtttttgataagaggaaaggccttctatccacatttttgcaggggaaaatgtgtgcatccatgtaatgatgccagcacatgtctcactgtactccgcttctcttaacagccctctaatggtttccggtgaagtgacgacgggcttatgagtgattttatatctggaagaaatcccgctgagcccctcacaaatgcttttagcatgctgatctacgagttccagcgtctcttccccgtataggtgctggcttcctgtcacaaaccagaattcataatcctttgtctgaagcatgtaaactgcccctttctcataaaataaaacgctttcaaatacaaaagatacgtactaatgatagaaaataaacctataaataaatatttgtacgaacaattttattatagtaattgactattatactgtcaatcttttctttttaaaaaagccgggggcagagcccggctttttgattcaataggacggccagcccgagctccaattcaaatcattgatgagaagctttggaatgccgttgtcattggcatcataggcatggcgaacaagaatgtttccgttcacaatatcctggcctccaggtcctttccattggtcattgcccgaatccaaaatggtgcctccgccttcaagcatgctttttccgcttttatcaagataagggcctgtaatgtttttggatcttccgtaagcaattttgtacgtactgtttaccccgtcacagcatttatcaaatgaaaccattaaatagtaatagccattttgatacgtaagagtaggagcttctaaggcacccccattattcggtctagctgcaatcgaatagagcgagcctgtaggcttcatcgtactcttatcgagcttagtcagcttaatgccgctccaaaacgagccgaatgcaagccacggattgccatccttgtcgaatgtcagctccgggtcaatggcgttataattatttgagcttgtcgaacgaatcaccaagccctcgtccttccagctccccgaactgatgcttgttgaagatgccaggccaatggcagatgtattgcttccaaaagaagaaacggaataatatagccagtacttgccgttatagtattggatgtccggcgcccactggttttgaccataattcggcacataattggaccaccacgatagcggtgtagtgaaaatggatttttgtacggtccaatttttagcgtctgaagacttcaaaacccgcagtccccgttcttcagtaagccctgttccaagcgcataccatgagctcccctctttaatcatagtcgggtcatgaagcagctcattggatgcaccccaaaacgctgcctctgcgggagcagcagaagtgaatatcaaacctgcagccagagctgcactcgaaaagtgtaagaagcgtttccatgtttttttctttttcaattttgtttaacctcctttatattagaaagcgcttacaaattagattgtttatcctcccttcctgtcaaatcgagctgcgtatcgtatatcgtcatgttcaggaaattttcggtatcccctttattgtagtcactatgctgtaatttgtacagacaaaaaaatagaatccgcctaaataggcggattcttccgtatctttattggtacgtaatttcgtcaaccgtttttcggtctaacttcttaatgacttccgtaattaactttaccgcgttttcataatcatcacgatgcagcatggccgcgtgcgtatgaatgtagcgggttgcaatggtaatggacagcgcaggaacgccattcgccgtcaaatggatggcaccagaatcagttccgccgccggcaatggcatcaaattggtacggaatgccggcttcctccgcagtggctacaactgcatcgcgcaaacctttgtgagagaccatggatgcatcgtaaacgataatctgcgggcctttgcccattttgctctgcgcttctttctcggaaatgccaggcgtgtctcctgctatccctacatcaacaccaaacgcaatatcaggctgaatggtgtgtgcagccgttttcgctcccctcaggccgacttcctcctgcacggttccgacgccatacactatatttggatgatctgtgttttgtaagtttcttaacacatcaattgcaatcgcacagccaatgcggttgtcccacgcctttgcgagtaggaatttttcattgttcatgaccgtaaattcaaaatgcggaacgatcatatctcccgggagtacaccccactccaaggcttcttcccggcttgaagctccaatatcaataaacatgtcttttatttccactgatttttttcttgcttcaggagataaaatatgcggcggcttagagccgataaccccagtgatttctcctttaattgtgacaacggtgacgcgctgggcaagcataacctgagcccaccagccgccaacggtttgaaaacggataaagcctttatctgtgatttgtgtcaccataaagccgacttcatccaaatgtccggcgatcataattttcgggccgttttctgcaccagtttttttggcaattaaactgcccaggcgatctgttgtcacctcatcagcaaatggttctatgtatgatttcatcacttgccttacttctctttcattgcccggtatgccttttgcatctgttaaatctttcagcatggtcaatgtttcatctaattttgccatgttccaaaccctccttcatcagtcctgcattcttattatacaaaacatggcgctaaccatacgactatttcacttgaaaatcgggtatatgtttttacagctttcttttagaaaaagtgaaacctttttctatgcttttcgtattacatcagatcatcaccataagggaggtgccttcacacaatgtttgtcatggttctaaggattattttgcttgcactttttgcttattgtatttatgccgtggtcaaatatgtcgcgaatcctaagagaaggcttaagctggcccaatcaaaagaacatttttatattattgatgaacaaaacaatacccggaagaattttcagctgacgtataaaggcgtgctttttgagggagaaaagcatattccttccaaggaccatccgctgtttattcacacgatctttgtctggacagaatctcctgagaagctgaaacatttctctgcaaaagattttgagaacattgaagaaaaagtgctggaacgatatccaaattgtaagattgactgggaccagcccattaaactcgcaaaaaaagcagaagagcgttaaacgcttttctgctttttataaatcaaacgggctgtagtaaatagcgatgagaatcgcttcaattaccagaagaagcggtactccatacttaaaagaagcgtgtttcgttttatgtctgaaggtttgcatgccaagccagacaccgagcgctccaaatacgatggctatcagccacagccggtcttcagaaattctccacttgtgctgttgcgctttgcgtttgtcaatgcccatcacccaaaaaccgcacagattaatcaacaccaaataagctgcaataatcatgttgcctcatcctttatatagaaaaagccgctctgctggagagcggctctatatgattacttgtttaattgagctttagcagcatcagcaagctgattgaatgcagtaagatcgtttacagcaagatcagcaagcattttacggtttacttcgataccagaaagcttaagaccgtgcattaaacggctgtaagaaaggccgttcatgcgagcagctgcgttgatacgagtgatccaaagtttacggaaatcacgttttttctgacgacggtcacggaaagcatagtttccagatttcatgacctgctggttagctactttgtataatgtatgttttgaaccgaaataaccttttgctaatttaagaacctttttacgacgcttacgtgtaacagttccgccttttactcttggcattgaatttccctcctaattgttccttatccgattacttgatgttagcaagcatttgtttgatacgtttgaagtctcctgcgcttacaacagcactcttgcgaagcttacgcttttgcttttgagatttgttggcgaataagtgacttgtgtacgcgtgagaacgttttaacttcccagaacctgtctttttaaaacgtttagcagatccgcggtgagttttcatttttggcatgggatttcctccttattgcttttcgtttttcggtgcgagcattaagaacatgctgcggccgtccatttttggttttgtttcgactgtcgcaacctcagcacatgcttcggagaaacggtctaatacacgctgaccgatttctttatgagtgattgcgcgtcctttaaagcggatagaagctttcactttatcgcctttttcaaggaatttaatcgcattgcgcaatttcgtgttaaagtcatgctcatcgattgtcggacttaaccgaacttcttttaagttaatgattttttgattcttgcgtgcttctttttcctttttctgctgctcaaatcggaacttaccgtagtccatgattcggcagacaggcggttttgcattcgctgcaactaacacaaggtcaagatttgcgcggccggcgatttcaagtgcttcctgacgggacttgattccaagctggtcgccattttgtccgattaaacggacctcacgtgcacggataccctcattaaccaattgatctttgctaataatgagccacctccatagtttcttcgaattgattcacaactcattttgtatgcattttgcaggcaaacaaaaagtgtgggcattataaaacacccacactacgaacatctgtatcaataaaaatgtacggtcaacctgccaactacatgcatgtgtcaatcaggtgagaagcgggtgcttctgcttgtgatttatattcaattcaataactattctacacaataccggatctttagtcaaggacgacttatccggaacaacttttacattgtaacatgggttttctatgagcgcaagagagaaaaagaaaatctttcatcccccccagaatgcaaagaaccaacaattccccccttatttcgcaatttacaacaaaaccaccgacaggaagaaatgtaaaacaaagttaatctctgaccgatataagaagcagaagggagcctgacacatgaacaaactgatacagcttgctttatttttcacattgatattaaccggatgctcaaatagcagcacatcttccgaatcaaaagtcgaaactgttaagacaactgcagcatttcctcaaaaggggctggagaaagagctaaaaaaactaaaacccgtttcattggacatgaagttcgagagtccacttgctactgagttaggaaagcggaaggcaaaagaagaagctgaaaagcaaagacaaatcgccgccgagaaaaagcttgaaaaagagcgggaggcgaaacgaaagaaacagcacgaggaaaaagcggagagacagcgattagcagagcagcaggcggcagagaatcagcgattagcggaagcaaaaagacaagctgaacttgaaagacagcggcaggcagcaatccaaaaagagcagaaagcgaacgctgagaaaaagcggcaatcgcaggcacaacggcagcagactgaggcacccccatctaatagtcaagatccaccatcttcctcgagtcagacagataaaaccattcaacagccagcttcagagcttcctgatgacgatggttatggttatgaagaacgaaaaaagtggcatgacgatcaagtagaatggggcattaaacaagggtatatcgatcccgaagacgcaccataaaataaaaaaagccaaggcattcagccttggcttatccaccgatcagctgcacgaacacagggatgaccagaaccgttaccactcctactacgacaacagcaatacttgccatcgcagcttcaacttctcccatctcaatcccgaccgctacaccaagtgcatgtccggatgttccaagagccaatcctttagaaatcggatttttcactttaaacaccttcaagaacaatgctccgagcgcatatacgatgacagcgttaaagatgaccgcaaaggctgtgatgtcgctgatgcccccgatgccttttgataaaggaagcgcaattgccgttgtagccgcctgcggaagcatgcttttcattacggccgaatcgagatgaatgcctttagcgagcaaataaacaatcgtgacagagcagatagagccggcaataatggaggccatgatttgccaccagtactttttaagcttatctctttgtttgtacaaaggaattgcaaatgcgatcgttgccggttcaaggaaaaacttaatgatctctcccccgttattataatccgcgtaggaaaaaccgccgatttttaaaaatgcgatccccagcaccatggcaacaaacaaaggagtgaaaaggaagaagcctttcgttttcttaaataaaaaggtgccgatgccgaatgcagcaagtgatacgacaatcccaaaataaggactcattgtgctttccatgtgaagaacctcctgtttcccttaatggtgaacgagttcgttattgttctgcgggctttgcactgtttttgttttcatgtccgctgcggttttgcgttttccgctcagcgacagaatcagctgagaaaacaatcccgtagcccccagcaaaataatcgttgcgagcagaatgacaagaacaatttgcaggccgtattgctgcatcacaccgagcgaattcataacagatatacctgacggaacaaataaaaatccgatcagagaggtcaaagacgttccgagcgtctccacttgttccagtttaatgactttcaaacataataggagaaataataagaccaaccctacaaccgatgccgggataggtattgggacaatagcggcaatcatatttgaaaccagcataatgacggcaaaaataaatgcttgtgttaaaaacccgtacacttttttagcactcattttcttcacctctttctctttggtacccccattataaataagaattccctgttataaagcgcttacaagataacatgccgaatagcgggtctgagttgcagaatcaaatggctgaaatgcaaaaagccgcccatcaaatatggagcagctttttcaattccttcgcatatgtccggctgaccggtattttcgatccgtctttcatgatcaaattatacgttgaattaaaccatggctgaatttctttaatatattcggtattcacgacaaagctccgatggacgcggataaaatcagaatccggcagctttttctcaatcacaacgagtgtatcgctgaccgtataagaatgatcgaaggtttttacattgacatgaccatcttctgttccggcatagataatgtccttcgtatccacaatcacaatcgattcccccacagatagcgcgagcttgtgctggccggcatggctgttttgctctgtttctacaatatcccgattgacttttttatattttttcagcgtttgctgaattctttcttcatcgaatggcttggttaaataatcaagagcatccacctcaaacgctttgagtgcatactggtcatacgctgtcgcaaacacaacagcaggaggatgcttcattttcttcaatcgctttgcgatatcaaaaccgttttctccagataaatcaacgtctaaaaacagcaaatcaggtttttgatccatcatttggtcaaaagcggattcgatattttccgcttcattgatttccatttcctcattggtccgcttaagcaagtaagccagttcatctcttgccagcatctcatcatcaactattaacaccctgagcatgttcttctccctctttcatctgttgcattggcacttgaaaggaaacctctgtccctttatgaacctcactgctgatatgcagtgcagcctgctgtccgaataaaccgatcagccgctgatttaggttataaagcgctgtaccggttccctccttagacggaaacggtttctttcccagttccggcaagacgtccggcggaattccgcgtccgttatccgccaccttcatatagacggatgcattatcagataagacacagactgtaaccttgcatatgtcttgttttttcggaaacgcgtgccgaagcgcgttctcgacaagcacctgcaaaacaaacggagggatttcaatctgctccagtctgctgtcgatattaagctcaattttatatttcccgggaaaacgcgcctgttctaatgacaaataggcgttaagatggtttagctcctttgagagcggaatcagcagctgtctcgctccttgaaggtttgaacgaaaataaacactgagctgcaataggagcttacgggttttttcaacatctgtacggcatagcgcagaaatcgtgttgatcgcattaaataaaaaatgcggattcacctgtgcttgaagcgctttaatttcagcatccttgagaagtttgctttgcagctctgcttccccaagctcaagctgtgtcgaaaacagcatggccagcccctcggcaagttcctcctctacctgactcaggcctgccgggcttttaaagtacatttttaaggtgccgattgtattgccgttcgatgtcagcggcagaacaattgcagcgtgcaaagggcattcagcatgcgtgcattcaatctcttcctgcgaaatcgccttcataatatgccctgttttaatcacctttttggacagcccggtgatcaaacttttcgatgggatgtggtgatccattcccgcaccgacatgcgcaaggatcttttctttgtcagtgagagacaccgcatctgttcctgtcagcttatggataatagccgctacacttttacaggagttctcatttaatccttggcgaaaaaatggaagtgtctgatcagcaatcgtcagcactcgatgcgtttcgagagcccttgcctgttcttccttgcgaatgatcgcttgaataatagacagaaaaataaaactgcctgttccattgatgagtatcatcggaattccgatcatgctgacaagctcccaagcgtcactgaacggctttgccatcagcaaaataatgatcatttgcagtgactccatgccgattcccacaagagcggcgatgcgcggtgtcggcattcgatatcgcttcgtaaaatacctgccgatcaagcctgcaagaacacccgctaaaatagatgagacggcacagcttaaggccgtgctgccaccgagtgaaaaacgatgcaggcccgcaagtatgccgatcccagcccctacaaaaggacctccgagaaggcccccgatttccacgcccaaaatacgggtattcgcgatagagcccgatggatctatcgtaaacacccagtcattgtttacaatcatatttctttgaatttcgatgcctgtataattgctgatgatgctgaaaagagaaaaaatagaaattaaaatcgcttttcctttatagccgtcctgattctgaagagcttgtctgaaaagtttcgtatgggcgagaatgaaccctaatataacaataatccccactctctccagcatcataatcattaaatgaatcattcatgtcacctgttctttccgttttcattctagcatgttttcgttttacggctgactgtttttttaaaatcgtctgaaaacatatttcacaaggcttttatctattgtaaaataaaacatgagccttttggcagaaagatttgaatctgaagcagaggagaagatcatgaaagccgtattttttgatttagatgatacactactttgggacgaaaaaagcgtcagaacaacatttgcagaaacttgcttacaggcggagaaaaaatatggccttgcccctgaggaattcgaagcagctgttcgcgaagcggcgagagaattgtacatgtcatatgagacgtatccatatacagtgatgatcggcattaacccgtttgaaggactgtggtccaatttctcagagccaatcagtgaaggctttcaaaagctgaacaagattgtgccggagtacagaagaaatgcatggacaaacggactgaaagcgcttgggatcgatgatcctgcatatggcgaatacttgggagagttttttgcggcagagcgcagaaagcgcccgtttgtatatgatgaaacttttgctgtactcgatcaattaaaaggcaagtatgaattattgcttttgacaaatggcgatccgagtctgcaaaaggagaagcttgccggcgtacctgagctcgctccttacttcaatgaaatcgtcatctcgggcgcattcggcaagggcaagccggatgtttcaatttttgaacactgccttaagctgatgaatattgaaaaagacgatgccatcatggtcggcgataatttgaatactgatattttaggcgcttcaagagccggaatcaaaaccgtttggatcaaccggacggataagaaaaacgaaactgacgtaacgcctgattacatcatcagcagccttcatgatttgtttcctatattagagaaataaaaaagcatgatctcttcaacgagatcatgctttttattttattttttcgcttcagctactgcctttttcacaaactcatcaagtgaaatggtttcagagttctgctctccatacttacggacgtttaccgctccgttttctgcttcttggtcaccgaccaccagcatgtacgggattttttgcatttgcgcttcacggattttgtagccgattttttcatcgcggctgtcgacttcaacacgcaggccttcacgctgcaggcgttcctgcacttttttcgcgtagtctaaatgcacagccggagaaaccgggatgacttggaactgaaccggtgcaagccatgtcggcagcgcgcctttgtgttcttcgattaagaaggcaacaaagcgttccattgttgaaacgacacctctgtgaatgacaaccggacggtgctgcttgccgtcctcaccgatgtatgtcaggtcgaaacgttccggcaataagaaatcaagctgtaccgtagacagtgtttcttcttttccgatcgcagttttcacctgaacatcaagtttagggccgtagaatgccgcttcaccttctgcttcgtaatagtcgtggccgatttcgtccattgcctctttcagcatggattgcgctttgttccacatttcatcgtcatcaaaatatttctctgtatcttccggatcgcggtaagacagacggaatgtgtaatcacttaaaccgaagtcttcatatacatcctggattaaacggactgtacggataaactcatccttaatttgatccgggcgcacaaagatgtgtgcatcatttaacgtcatcccgcgtacgcgttgaagccctgacagcgcacctgacatttcatagcgatgcatcgttccaagctccgcaatacgaatcggaagctcgcggtaactgtgaatgtcttgtttgtaaatcatcatatggtgtggacagttcatcggacgcaatacaagtgtttcattgtccatttccatcggagggaacatgccttcctgataatggtcccaatgccctgatgtttcatacagctctttgctgccaagcacaggtgtgtatacgtgctcatagccgaggctgatttctttatcgacaatgtaacgctcgatgacgcggcggattgtcgcgccttttggcagccaaagcggcaggccttgtccgactttttgagagttcgcgaacagctttaattctttgccgagctttctgtggtcgcgttctttcgcttcttctagcatacgaagatgctcttcaagatcagcttttttgaagaaagctgtaccatatacgcgctgaagcatttggtttttgctgtcgccgcgccagtatgcgcctgcaaggcttaacagcttaaattctttgatttttccggttgaaggaacgtggacgccgcggcacaggtcaaagaattcgccttgctcatagatcgaaacggtttctccttcaggaatcgcatccaatagttcaagcttcaggtcgtcgccgatttccgcaaaacgggctttcgcttcttcacggctgacttcttttcgaacgatcggaaggttcgcattaacgatttttttcatttctttctcgattttcggcagatcctccggtgtaatcgcttcgtccatttctacatcgtagtaaaacccgttttcgataaccggaccgacgccgaatttaacatccttgtagatgcgtttaatcgcttgagccagcaagtgagccgtactgtggcgcataatttgaagaccttcttctgagccttctgtaatgatttccactgtaccgtcttcattgatcggcgttctcaaatcgatttcttttccgttcagttttccggctaatgattttttctttaatcccggactgatggatgccgcgatatcttctgttgttgttcctttcgcaaactccttgactgctccatcaggaaatgtgatttttaccatatctgacatctttgtcactcctttttttgcatataaaaaccccgccccctatgaaagggacgaggttgaataaacggaatcgtggttccacccttttttccgcaaagccaatacggcacctgcggctctaagctctgtaacgggagttcccgtcagccattactgttccttttcaagaggttcacagctgaagttcaaaggcggtaaagcgaatggtccttagctgggaagcttgcagccagggcttccctctctttgagctggtatcattccttcgtgtccttatcaatacgtgtgtctttcttaatctcctatgtattataaattgttcaatccaaaaaatcaacacgatcgcgtttccttttttaaaccgacagccttaaatagacaggctgccggccctcatccttccgagtgcttcaccggtatttctgcatctgtaaaagcatgcagcgggagcatttccactctctcttgaaatacgttttgaatggtccttgccatcatgtgctcgggctggtcggtataaagcacgacttcatcaggcgcaatggaaatcagcggcgcgagcaaatgagaatcaatatacataggatgatcccggacaaatcttctgtctatgtatttcattttttcccgttccggcacatagcgcagctcccataatgtaaaggaaccatcatggacaatatgcacttttttgattcgcggctgtttggcgtccacatagtctctgagtgtttgaataaagttttgatattcctgttccatcttatattcatcaatcgctgcttctgtaatatctctcagctgcttatagtatgatccaagtcggaaggtctgaaaggagcgaatgtaaaatactccttcctctaaacagatcgtttggagttcatccaaaattgattgtttccgtgaaagcttcagcggctcaaacggaagatcgtctgcttcaccttcaataatactgtgtgcgagctgaaggatttgctgctgttcatcctggtccgtgaaacaataagtttcctcaatcaatgacagcatatgctcgtcttctttgcattccaaaaaaaatttgaccagaatcggctccataaaacgctgaataggaaaagccggattcgctttttcaatcccgatttttcgtatgccttcacggacaatgatattgttccgatcgtccgaatgctgaatgagatgtaaaaaagcggctgcatcatggtcatcttcaaagattatttcaagcatgtttgtccccccttacggcatctgttacaagtatatgggggatgtttttaaaatagacgtaaaggtcattggcaaatcttaatttgattcttggaacaagttttgcattttctttctgaagatgaacggcaatgagataaacacgatatacaaagcgagcaccataaagaaagcgggcagattgccagccaaaaagctcgcacccagcacattaagcgcaatcgtcccagggatgattcccacagccgttgcggcaaaatacggcagcgctttgacattggaaaggcctgccgcatagctgacgaaatcaaaattgatcggcaggattctcaaaagaaagatatagaaaaatccgttatcctccatttgcttctgtatggcttcaagcctttcgtaatgcccgttctttttcgccgaaaacaaaccagccgcaaaaaacgaaacagctgaagcgcacatcgaaccgaataacgtataaagcgtgccgagaagcgggccaaacgcaagtccgccagctattgaaataacagacaccggaaataaaacaagtggcctgacgatggatatcccgataaacatcagaggtgcaaagactccgaacgacaatacccataccctgatttctttcggcgatacattcaaatacgttttatttccccaatagagtaaaccagcacctgcaagcactgccagccatttgacagccgtttttcgtttcataccctcagttccttcccctttgaaccacagcaattatggatgtcggcggttttctccgtcaaggcggatcggagcagccaaatataatatccgctccattaatcttgcagcttttacttcttctttttctcccctctgcgaatacgtaaaatgatgcttcagctcgtcaggtgagaaattagaagaaaagaacgttggcagctgctgggacattctgtgctgaagcaccgttccgatgacctcatcccttacccagcttgtcattgattctgctccgatgtcatcaagcattaatacgggtgtggtctttaccatattgagcttctcttccaatgtctggtcttgcagcgaattcttaagctctctcacaaattcaggcacataaacaatcatggaggaatactctttttccgccagctcattggcaattgcagcgagcataaacgtttttcctaccccaaatttcccgtataaatataatcctttcccttttcccgtctcattatagcttttcaggaagtctgtaacatgctgaaacatcgcgagtctgcttgggtcactgatatcaacttgctggaacgtcgctccaagaagatcctgctggatatacatgcttttcataagagactgttgtttcttctgctggtcgagcttccgtttgactggacattcgtaatactcgatatcaatagacctcccattgacaacaagcttcggatggtagccctccaacaaattgttgcagttttcatcttccgaacaataggagcaattcttgctttgttcgatatattcataaagcttatttaagctcttttcgatcattttttggtcaatcacttcttcgttttccttcaaaaatgcttgaacatcttgatctttcatgactttttccttcatttgttcaagacgtttttggaaatccggcctgccggttacgccctgcagggaacggccgattggttccatctattccttcaccccgcatctctgtctttaataggcagagtattttttcagtttttgcatttcttccatcatctttttcttctgttcttccaaatcctgcggatgcagcttctgctgtccggattctgaatcggacgctgtttccttttctgtcatccaatcaggaagcttttcttcacgaatcactttttggtttcgtttcgaagactttgtttttccctcagcccattcaagatactggcggttttcttctattgcgagcttcatcgcttccctgaccgttttcacctttttgcgtgcccaatgcgaagcgattttttggatatagtttttcgacagcttcatgtcggttttcagcatgacataataaattaacacatttgtgacgcctggctcgagcttctgttcgaacataatttcttctatgatcttcagatcagcttttgacggctctgttccgtcagcaatgtcctgcagaagcttcttcggggaaatcgcctccagcaatgcaatcagcttcccatccagagaatcctcttctgccggtttttcgccttcacgcagatgcaccggctgtgttttttccaccaaatcgggcagctgtccgtttctttcaatttgataccagtcgctcgccgcttttcttaatgcctccgtcgtaatgacgtcacgctcatcaattgcgctcatcacaacattttgcatttgcaaagggtcaattccgtacagataagaaagctttttgattgtgtcccgcacctgctgggtcatcgcttttctcggtatcatcgtctcagaaagtcccgctaaaaacaaatcaaaatcaaacacatcctccgttatggtgtaggacggagactgtccgacagaagtatactcggacccctcggcaagccttaccgtttcctccatatcggatgtgagcttccattcactcggctgcagcgattcaaacgcatgattaaacggacgcgtaatgtccttcgcatcttctgaaatggccgggtgcgtaaaaaattgttttaattgctgatatttcgtttttccgaccctattatacagaaaaacattcagcattccgtcttcaaaaaattcatttggtctgagcggcggaaggagttcatatataaagaggcgctcctgccgctcggattctttcatatatactttcagcaatccgatgccctcgagcttcccctgttcctgatggatcgtttttaagttggactgtgtcatcgccatcagctgtctatgtgtggactctccgccccacagacggttttgttcaagctctccccacaatgtcatataaagagagaatgcaacagggccgattaagggctggtacagttgtgtaataatttgtctgtcaatatcctgcagcatcgatctgcttttaaccacatacgggtctacaggcagtacatctttccaatagtcagccatacattctcaaaccttccgaatttgtttctacctttcattttacaccgtttcttatatctatcaaatgccaattttgcacatgagaaaagagctagaagaatcctcttagctcttttaacgctctttctttattaagtcttttaattcatcgataaagacgtttatatctttaaactgccgatagacggacgcgaaccgcacatatgcgacttcgtcaatcttagccagccggtccatgaccatttctccgacgagctcactcttcacctcggagcagccttgattgcgaagttctttttcaatatcaaagcacatgtcttcaagcgttttgagtgaaacaggccttttttcacatgcttttatgaggccgcgcagcattttttctctgctgaattcctcacgcacaccttcttttttcacaacgatgagcggggtttcctccactttctcaaaggtcgtaaaccggtagtggcaggattcgcactcgcgtcttcggcgaatcgactttccgtcatccacaggccgtgaatcaaggactcgtgttccgttatgctggcatgaaggacatttcaataaaatcagctcccaactatatcgttccctgcaatgtattttcggcagcctccgccttttaaaaatagatgtgacagcatctgtcgggagagccgttgttaaatttgtttctatagcattaggtggtttgtgaaaatctccttcttattttacaaaaaaaatgaaaaaagaaaaagctgacactctcgtttctttataaaaataaaaggagcataagctaaaaagcgcataatggctttctagcttcagctccctttgtgttcgcaatttactttatagtactttcgcttgcgcctgtttaatttgcacaggccccattcctcttggtatttcaatgttttctcttgtatcagcatgtaatgcctctgcaatgtaatcagcagcgacattaggatctaagtctccacaagtataaacatcaatgctcgcatatccgtgctcaggaaaactgtgaatcgttaagtgtgattcagaaataatcacaactccgcttacgccttgcggtgcaaatttgtgaaatgcaacctcgcgcacctcagcacctgattttagagcagcatttacaaacgttttttcaataaaatccatgtcattcagcttatcaaaatcgcatccccatagctcggagataacgtgacgccccattgtttccatagtcatggacccccttaacaagaattaaaaagtgaaattccaacaactgggtcggccatttaccacgggggaaagttagtccggagaggtcctaaccctttaagtaattccgaaacagtctcaagcaagaagttcacgaaaaatagtatactgtgtttaagtctaatttgcaaggtgcgttttttcagaaatatgctgttaagggttttttctttaaaatgtgtccatgaccttattttatacagcagacggatgtttcattcgtgccgctacatggcggattagatcaacaactctgcaggagtagccccattcgttgtcataccacgccagcacctttactttcctgtcttccattaccattgttgtaagcccgtcaatgaccgctgaatgcggattcgtattataatcagtcgaaacgagcggttcatctgagtaatcaagtacaccgtacatcgacgttttggcagcgcgtttaaatgcctcgtttacttcttcagccgtaacatccgttttcagatcaacaacgagatcaaccaatgagacgttcggaacagggacacgcaaggcgaggccgtgaagttttcctttcagatgcggcagcacaagcgaaagcgcctttgccgctcctgttgttgttggaatgatggattcaccgcaagcccgcgcccggcgcaaatctttgtgcgggttatcaatatttttttggtcattcgtatacgcatgaactgtagtcatcagaccgctctcaatgccaaactcttcatccagtacttttacaacaggcgcaaggcaatttgtcgtgcatgacgcatttgaaataatgacatggcgctcagcgtcgaattggtcctcatttacgcccatcacaatggtaacgtcttcattttttcccggagcggtcaaaatcactttttttgcacctgcttctatatggcccatcgctttatctttagcattaaacttccctgttgcttcgacgactatgtcaatatcatattcccgccaaggcagctgttttggatcacggctgtttaacaaaagcactttctttccatttacgatcaggctgtcttcaccagccacaacctctttgtcgtatctgccgtgaattgtgtcatactttattaaatgagccagcgtttctgcggaatagctggcgttaatggccactacttgaatttgatcgtctaacatcgcttttctaaaaaccattcttccgattcttccaaacccgttgatcgctacttttaccttcatgttggacaccccttatcaattatgccatcctaatttgttactatctaaaattagtataacacattaaaacaaattcgccagtacatattgataaaaatcaacgattataacgctaatttatgatgcatcttatgttttcttgcacagaatatcaggcgtaagaaccaaaaagcagccagcgctccgcactgactgccctcatgctttatgattcctgttttaacttatcattgagcacactttcttctagcacagaaaatgtatccccgtatactctgttaatatgattcgctccccaagcacacagcatatctaaaattccttctaagctgcggccgtattcgctgagctcatattccactttgggaggaacttgattatatacgattcggttaatgacaccgtccgcttccagctcgcgcagctgctgagtcagcattttttgcgtgatattgggcattaggcgttttaattcgcttgtacgtttttttccgtgcgtcagatggcataaaatgacgcatttccatttccctccaatcacttcaagagtcgcttcaacagaaatgttatattttttcttctccatacaatccattctcctcacaggcaccaaaaagtgactatagcacttcaaagtacgtacttttatttcttaacgatatgtttcataatcacatttgccggctgatttgaatctgctcttttttatttatatagcttactcggcagaatttcaatcatacaacacatcttacaaaggaggaacatcatgacttcagccaaaagcagtattcctgcactactggctttggccgtaagtgcattcgcaatagggacaactgaatttatcagtgtcggccttttgccgctcattgctgatgacctgcatattccagtcacgacagcaggattaaccgtttccctttatgcgctcggcgttacatttggggcacctatattaacttcattgacctcaagcatgtcgcgtaagacactattgctttggatcatgtttatttttattgccggtaatacgatggcagcaaccgcttcaagcatcgggattttactagcagcacgtgtgatatcggcattttcgcacggtgtgtttatgtcgatcggttcgacaatcgcagcggatattgtcccggaagataaaagggctagcgcgatttcaattatgtttactggcctcactgtggcaactgtaaccggagttccttttgggacatttatcggccagcagttcggctggcgtttcgcctttatggtcattatcgccgtcggaatcattgctttcattacaaatggtattcttgtaccgtccaaattacgaaaagggacgaaaacaacgatgcgggatcaattgaagcttgtgacaaacagccggttattgcttttatttgtcattacagcgcttggatacggaggaacattcgttgtgttcacgtatctgtctcccctgcttcaggaagtaacaggcttcaaagccgggactgttgcagtgattctgctcggatacggaatagctattgctatcggcaatatgattggcggaaagctgtcaaaccgaaatccgattgccgctttattctatatgtttatcgtacaagcaattgttctattcgtactgacatttacagccccgtatcaaacagcagggctcattaccattctctgtatgggattgctggcctttatgaacgtgcccggccttcaggtgtatgtcgtcatgctggctgagcgttttgtcccgagtgcagttgacgtcgcatccgcgatgaatatcgctgcctttaatgcaggaatcgcgcttgggtcataccttggcggtgtgatcaccgattcaatcggattgattcataccgcttggataggcggattaatggtggtcggtgcagtcattttaacaggctggagccgcttaatggaaaaacgagatcggcaggaagcctgacaattttaaaggaggaaatgaacatgacaacacatttacaagcaaaagcaacacttcataatggggtagaaatgccttggttcggcctcggcgtgttccaagtggaagaaggatctgaactggtaaacgcagttaaaactgccattgttcacgggtaccgcagtattgatactgcagctatctatggaaatgaagctggcgttggagaagggattcgggaaggcattgaagaagcaggcatttcaagagaggatctgtttatcacatcgaaagtatggaatgcggatttaggctacgaagaaacactcgccgcgtttgaaacaagcctatccaaactcggtctggattatttggatctatacctcatccactggcctgtagaaggaaagtataaagaagcttggagagcgcttgaaacgctgtataaagaaggccgtatcaaagcgattggcgtaagcaacttccaaattcaccatcttgaagatctgatgacggcagctgaaattaagcctatgattaaccaagtggaatttcacccgcgcctcacacaaaaagagttgataagatactgccaaaatcagggcatccagatggaggcttggtcacctttaatgcaggggcagctgctggatcaccctgtattggctgacatcgctcaaacatacaataaatctgtcgcacaaattattttgcgctgggatctgcagcatggcatcattacgattcctaaatcaacgaaggaacaccgcattaaagaaaatgcaagcgtatttgactttgaattaacgcaggatgacatgaaccgaatcgatgcactgaatgaaaacttgcgagtcggtcctgatccggacaactttgatttttaatggcaaaaaaacaccgttcaatatgaacggtgttttttgtattatgcccagctgttcatgatttcatcaagctgccttttggtctcttcaagcgtgccgctgttatcaatgacttgatctgctcttgctgttttttcctctaagggcatttgagagcggatacggctgactgcttcttcttccgtcagctgattgcgcttcatcagacgttccagttgaagctcttttgtcacactgaccacaataattttatcaaccaatgattccaatttgctttcgaacaatagcgggatatccaatacaacaaatgcctcccgatttgcaacggcttcatcacggcgattgagcatttcctgcctgactgcgggatgaacaattgcatttaaagcgagacgcttttgttcatttgtaaataccagcgctccaagcttttttctatctatatcgccatttgagagcagtatgtcttcaccgaattcgtcaatgatttgccggtaggccggcatccctttttctaccgcttgttttgcaatgatatctgcatctataactgttattcctttttcaatcagcatattggctaccgtgcttttgccgctagctattcctcccgttaaaccaatgactaaggtcaagagatccactcctttttacaatttccagagcccaatcgtgattaacagaagccccggcaaaaacgccattttatcgatccatttccacttagacagaaaatggccggcattggttccaattgatacaaacagcgagctcatgattgccacggcgatgctcatcacaatcggtgaaaaaccgagaatggctgcgcctatgcctgctccaaaggcatcaattgataaggcaaatcccaataagaccgcctcaattccattgatcacacccgatttgtcgatatccgcactcatgggttttctcaaaatatgaatcacaatccctaatgaccgaacctctaaattaagcagcgttttttcatgcaataggtattctttatcttttgccggtttgaagaattggtacagaacccacgcaccgattccaaccaatatcaaaccgccaagcttctccgtcacatatacaggaaaaaacttcgtgagaaagcttccgatcagcatggatataaacatgacagcaccggaacagcaggcgataaccaaaatcgctttaaacggtattttcatttttctcaatccgtacgtaaatccgactgaaaaactgtccaagctgacagccaacgccagcagcagtatagaaaccatttgcatatccgtttcttcctttctgttggtgctcttgtatcagatgtgaaatgcccgggattcatcacaatcatatatatgggaaagtgaaaaatccgtgtttcgaaaatggcatcctccattacagagttactgatatatgcaccgacagcttggacgatgaagcattatgctacttttttttctggcactttgcgcaaaaatgcgtgcctcttcctccaacgacaattttcgaaatcatcgttccgcaatttttgcatggctcgtctttttttccgtacacaaaatgctgcagctggaacattccgatttccccttgggagttgatatatgaacggactgtgcttccgcccgcatcaatcgcctcctgcagagtgtttttgatttcagcgtgaagggttttgattgttttatctgataattgatttgcttttatctcgggatgaacacccgctctgaaaagagcctcatccacataaatgtttcctagtccaactaccgttttttgatccagtagggcagttttgacagcgcggtttgttttcgcaagccgttcttttaaatacgcactcgtaaattcttctgcatccggctccggacctaactgagaaagcgggagctcgcccgcttcttctcccggtttaaataagtgcatggttccaaatttccgcacatccctgtaccggagctgggttccatccgtcatcgtgaatatgacatgcacgtgtttatcgtcaggctcctcggcttgatgaagaccgtattttccttccattcgaaggtgagaaaccataacataatgatctaaatgaaacagtaaaaactttccccgtcttccgatggactgtatcgtttctcctgctagttttcgcgcaaattcctccggttcggcaggccgtttgatgatattcggccatctgatctctaccgatttgattgtttttccctttacaagcccggtcagagtgcgccggaccgtctcaacttctggtaattccggcacatccatcacttcctatctctgtttatttcgcatcgtaccaagatgggcctgatgcaaagtccacctttaacggcacatctaatgcaagcgcatgctccatcacttcaggaacaagcttttcaagaatttcaatttcttcctttggcgcctcaaaaatcaattcatcgtgtacttgaagcagaagccttgctttcaactgtttttctttcagcttggcagccatgtcaatcatggcttttttgataatatcagcggcgcttccttgaatcggcgtattcatggccgtccgctctgcaaaacttcggatattaaagttccggctcgtcagctcagggatgtagcggcggcgatgcataagcgttgttacgtatcctttttgcttcgcttcctgtactgaatcttccatgtacgcttttacgccttggaagctttccagatagcggtcgataaatgctcccgcttccttccgggtaatgccgaggttctgtgacagaccgtaatcgctgatcccgtaaacaatgccaaagttgaccgctttcgcctggcgtctcatcgcagatgtcacttcatccttagcgacatggaacacatccattgccgttttcgtgtgaatatccatatcatttgtaaaagcttcgatcagattatcatcctttgaaatatgggcaagcacccgcagctcgatttgtgaataatcggctgcaaaaatgagccagtctttttcagacggcacaaaagcttggcgaattttccgcccttcctcaagcctgatcggaatgttttgcaggttcggatcagtcgagctgagacgaccagtttgcgttaaggcctggttaaatcgcgtgtgcactttatgcgaatccggtctcgtcacctttaaaagcccttcgatatatgttgattgaagcttgccaatttgtctgtactgtaaaatatagtcgacaatatcatgcttgtcagccagcttttcaagcacatcggcagacgtagaatagcctgttttcgttttctttacgacaggaaggccgatcttttcaaataagatgacgcctagctgtttcggagaattgatgttaaacggctctcccgcaatctcatggattttttcttcatattccttcagcttcgcacccagttcttcacccatccgttttaaacggtcaacatcgactttgacgccagttgattccatttcgccgagaataagcgcaagaggcatttccagctcttcaaacagttcaagctggtcgttgttttccagctcctgaacgagcttttcccgaaggctttgaatcgctaacgctttgcggccaaggtgctcagacagtacgtcttctgacggcactgctcgttttgctccttttccataaactgattcatcacttgaaacgatatgcaagccgtaatccttagccacactcgcaacgtcgtcatatgaattgcccgggttgatgatataagccgcaaggagcgtatcaaactcggctcctttcagctcaatgccctgccagcgcaaagcgacaacagcccgcttgctgtcgaagacccatttcttctgctcgtcattttccacccattctttaaacacctcagactcaacggcagtgtctttcggaatgaaataagctcccttttcatttacgatcgaaaatccgagaatcggctcttcatgataattatcgccaatctgttcaacgacaaatgcggatggagaaaccaatatatcgcttgtcacgtctgtgactgttttgacattaatgtcttccaacgattgatcctgttctgcttctgcactgtcttctccaagccgttcaagaagcgtgttgaagccaagatctttaaagatggcaatgacctgttcacgattaaagccttgatattccaggccggaaacagatacctcaatcggagcatccgtcataattgtcgcaagctccttgctcatcaatgcttgatccttaaactcctcaagcttttccttcaatttctttccgctcacctcgtcaatggactccagcagcttttcaacggaatcaaattgttttaaaagcttaatcgcagtcttttctccgacgccgggcacacccggaatattatctgaggaatcgcccatcagacccttcatgtcaatgatttgttcaggcgtaagcccgtatttctctttgacatgctccggtgtgtaaaattcaacatcggtaattccctttctcgtaatggcaactgtcgttttgtccgttgccagctgtgttaaatccttatctcctgagaaaaccttaacttcaaatccgtctttttcagccgatttggccagtgtgccgataatatcatccgcttcatattgttccagttcatagcggctgatctggtaggcatccagcagctcgcggataaacggcatttgttcggaaagctcaggcggggttttctgtctgccgcctttatattctttaaatgtgccgtgacgaaatgttgttttcccggcatcaaacgcaaccagcatgtgcgtcggtttttcatcctcaagcattttcatcaaaatcatcgcaaagccgtatacggcatttgtatgaacacctttatcattgcttaacagcggcaatgcaaaaaacgcccggtaagccagactgtttccgtctacaagcactaatttttttcgttccgtcattcaatttcctcctaagaagcctcaggcttccattcatctcttacatagtcattagctcctcttattttaacaaagttcaatttgaaaggaaaatacgtgaactataagagaagacacaaaaaaggacgggaacacaaataggttcccgccgtcaaaattggctccttggatgaaggggttctactacatcctaccagcataggtttaacagtgcatgaagatattgttaaacctttgtaaacattaggcggacttttcagcggcccgtttcagcgtcacggtaaagacagttccccgtccaggctcgcttgtgacatcaattttcccttcatgagcctctattaaatgcttgacaatcgcaaggcccagtccggttccgcccgaattcctgcttctgtctttatctacgcggtaaaagcgttcaaagatgcgcggaatttcttctttctgaattccgattccagaatcagcaacctcaatctgaatgtctttttctctgggctttacattgatagccacggagcccccctcaggcgtgtaggttaacgcattgtttacgagattaagaaatacctgtttcagcctgtacgggtcaccagatacatattgagggtctttcggggcattcagttgcaaggagatgcctttctcatccgccttatgcttcagaagcgtttcaatctcaccaagcattttggccggctcaaacgtttcgatactgagcgtgaaattttgctgctcgatttttgagagatcgagcaaatcctgaaccaaagactgaagcctttcgctttccttaagaataatagagagaaattcagaaagcgcctctttgtcttccatcgccccatccaataacgtctccgtaaacccttttatggacgtaatcggtgttttcagctcatgagaaacattggccacaaaatccttcctcatctgctctaatttctttgtttccgtcatgtcatggaaaacgagcacaattcctttccattcatcgtccggccccataatcggaacgccgtccacttcaaaataacgccgttctattttgatcggaagtcttaacagcttgcatttctttgtctccgtcataaaaatgtcttcgacaagctggatcacttcttcatgttcaaatgcatcgtgataaagacggcgcagcatatgattcggattgatatgaaactgcttggcgtaagatctgtttacgagattaataaagcctcttccgtcgatcataatcagcccggagccaatgttttcaatgactgtcagcagccgatcccgctgcatttcctgcgttcgcgtcatttccatcagatcaatggcaaggctgttcatcgcatgtcctagcttatcagaacgcctaatatagccgccgtacgtccgtgcatcgtagttgcccttagagagttctgtggctacatttgtcgctgactcaattgaccttttataacgtgaggtcatgctggaataaaaataaacaatgacgataaatgcggtacaaagactggccgtcagcatcccccacaattcgccttttaagccgtcgcttttttcagaggcggaaagcagcacatatcctgttttttccccttcgcttctaagtgaaagtccgtaataaagcttgttatctgttgttgacagaataccctcatggccagaaacaagcgcctgcaccttttgggaatcagccgctctcccgttagacccatacagcaccttgccgtctgtatcgataacggatgcgctcacatcaagcgcgccgcctgcatctttaatgattttctcatttgtttgattattcagattgccggcatcaagaagcgaagccaagtattttgcttctttttcaatgtgttcctctgctttcctttgatcagatgtttcaaaaagctgctgtaaaaacagcccgagaacacaaaacaccagaatcatacagacaacgaatacagaaaaaaggcgcacacggtatttattcattcatttttggctcctccagtttataccccaatcccctaatcgttttaatgtagatcggttttttggtattgttttcaattttgtcgcgaagatggctgatgtgcacatcaacaattctcgtatctccggcaaaatcataattccagactgcgctcagcagcagatctcttgtcagaactctgcctttatgtctgcctaaatagagcagcagttcgaattctttcggtgttagttcaagctgactttctttaaagtacgcttcataatgatcaggcaggattttcagatcgccgattacgatctggccttccatttcatcgttcttcatctcactagagggcgcagctatttccgaacgccttaaaatcgctttgactctcgcatttacttctcttggactgaacggcttggtcatataatcatcagcaccgagctcaagccctaatactttgtcgaattcctcatccttcgctgtcagcattaaaatgggaaacatcagtttttgctgtctcagctgcttgcatacttcgattccgtccaattttggaagcatcacatcaagcacaatcaaatcaggcttctctgtttccgcttttttgagtgcttcttccccatccgaggcggtaatgacatcatagcctgaccgttccaaattgtactgtaaaagagtaacaatagattcttcatcatccacaactaaaattttcttgttcatgctgtgcctccagtattataattccccgacatcctatttctctattttatgtcatcttaacatgtttcatgattttattttagcgaaagcaggacattccgacaattcgccttttacatcatttttaaaagaaataaagacgtttatgataacgctttcatttatagtaaaaagagaaaggctgtattaagcaagcctttctctctttttattaggataatactttcatgacatttttgacagattcaactgatttattcagctgcgctctttcatagtctgtcagttcaagttcaatgatttgctcaagaccgttgccgcctacaattgtaggaacaccaaggtagatgccttcatagccgtattccccttcaagataagcaattgtaggaaggacgcggcgctgatccttcaagatcgcttcgaccatttctgtcagagaagccgcaggcgcataatacgcgcttccgtttccaagaagattcacgatttcgcctccgccttttctagtgcgctccacaattgcgtcaatccgttctttcggaataagagtttcaagcgggataccgccagcataagaataacgcacaagcggcaccatatcgtcaccgtgtccgccgagtacgaaaccagtcacatctttcactgacaggtttaattcctctgccacaaatgttctgaatcttgccgtatcaagcacaccggactggccgattacacgctctttagggaagcctgattctttgtacaccgcgtatgtcattgcatcaacaggatttgtcagcaccacaataatagagtcaggagaatatttcacgatttcccgcgtaacgcttctcataatcttttcgtttgtagagaccagatcatctctgctcataccaggttttcttgcgataccggctgtaatgacaacaatgtcagagccggctgtatcctcgtaattggatgttcccgtaatttttgcgtcaaagccttgaaccgggcttgcttcaagcatatcaagcgcttttccctttgtcgggttctccaattgcggaatgtcaacaagaacaacgtctgccagctctttttgagcgattaaaaatgcagttgtagctccggtaaaacctgctccgataacagaaacttttttacgagtatttcccatgtctctcttctcctttatggctagttttaggctttttccttgcttagtccatgtttttgatcagttcttctccgaactctgaacatttcacttcagtcgcgccatccattaatctagcaaaatcgtaagttacgactttggaagcgattgttttttccatagatttgataaccaaatcagccgcttcgttccatcctaaatgctcaagaagcagaacgcctgaaagaataactgaagatgggtttactttatcaaggcctgcatatttaggagccgttccgtgcgtcgcctcgaaaatcgcatgtcctgtttcgtagttgatgttcgctccaggagcaatgccgattccgccgacttgcgcagcaagagcatcagaaatgtaatctccgttcaagttcattgtcgcaacgacatcaaactcgtttggacgcgttaagatctgctgaaggaaaatgtcagcaatgctgtctttgataatgatttttcctgctgcttccgcttcgctttgcgctttgttggcagcgtcttttccttcttcttcagcaatgcggtcatattgagcccatgtgaagactttatctccgtattctttttcagcaagttcatagccccagtttttgaaggcgccttctgtgaacttcatgatgtttcctttgtgaacaagtgttacagatttgcggccatgctcgatcgcataatcaatggcagctctgaccaagcggcttgttccttcttctgaaacaggcttaatgccgatacctgatgtctcagggaaacggattttattgacgtttaactcattttgaaggaagctgataagcttttgcacttcttcagagccttttgcatactcgatgcctgcgtaaatatcttctgtattttcacggaagatgaccatatcagtatcttcagggcgttttaccggtgacggcactccagtaaagtatcttacaggtcttaagcagacgaataggtcaagctcttgtctgagcgctacgttcaaagaacggataccgccgccgacaggtgtcgttaacgggcctttaatcgcgatgaaatattcgcggatcacatctaatgtttcagcagggagccactcacctgttttattataagccttttctccggcgtaaacttctttccatgtaattttcttttcgcctttgtatgctttttctactgctgcttccaaaaccttcgaagccgcgttccaaatatcaggaccggttccgtctccttcgataaatgggataatcgggttgtttggtacgtttaatactccgttagagactgtaattttttcaccttgtgccacaataaaaacctcccagtatgtaattcatatttagaaaacattttatttttcttatatagaaaataaaatgatttttcctaacattcaatttaaagtgtaacccaattttgatgttctgaacaagaggctaacctcattgacgcaagccagcctccaatggttctttaggctctttcttcaatcggaacgaatttttgtttgtcagggcctgtgtaatctgcccgcgggcggatcagacggttgttgtcatactgctcaagaatatgagcgagccagccggacattctgcttacagcaaaaatcggtgtaaacaaatcatggtcaataccgaggctgtgatatacagaagccgaatagaaatcaacgttaggcggaagctttttctctgatgtgacgatgtcttctatacgaatcgacatctcataccatttgctttcgcctgtcaggttggtcaggcgcttgctcatttctttcagatgcttcgcgcgcggatcaccatgcttatacacacggtggccgaatcccatgattttttctttcttttcaagtttagcgcggatgtacggctcagcgttttccacttcaccgatttctgtcagcattttcataacgccttcattcgctccgccgtgaagaggccctttcagcgcgccgattgctgcagtaatgcctgaatagatgtcagaaagtgttgcgacgcagaccctcgctgtgaacgttgacgcgttcagctcatggtcagcatgtaaaatcaatgctttgttgaaggcttcaacttcaattggtgaaggctcttcaccgtttaatgtgtaaagaaaattctccgcaataccgtaatcttctctcggttcaacaggctcaagacccttgcgaattctggaaaacgctgcaaccaggccaggcacctttgcctgaaggcggatcgcctttctgtagttggcttccgggttcatggtatcagcctcgctgtcaagcaggcctagtaatgaaattgctgtccgaagagcagccatgggatgaacattttcgagggaataagatttgaagtgctcaataatttcttgcggaacggcagcttcctttgcaagctgctgctttaactcttcaagctcttttttgtttggcagccttagatgccaaagcaagtagatgatttcttcaaaacttgcattctctgtcaaatcatcgatatcataccccacatatgtaagggtatcatcaataatagaactaacagatgatgttgttgctacaaccccttcaagaccgcgtgtcgctgtcatatataacatctccttttcaataaatttcccctttaagagtgttgtaaaaacatgaggcttacttaaaaagcacgatgcaagtatttctctcccccaaaaagaaaatgcttacattttactggctgctggaactaaaaccctttgcttatgaaagaacataacaaattcttataagcttatttaagtttaagcctattctcattataaacaataatcagacatttgttaaatgtttacctataattttttttttcattctgtgatttccccgaaaaaacgcctttatttgcgggtttttgcataaaaaaaaagcggctttaaggccgcttttttttatgaagtgaacagttttacgatctgcatggctaaataagcaatccccgctccgatcagcggccccaccgcaactcctccaaaaagcgcgactgcaagaatggtcccgatcacgagagcagttgtaatatgcggatcattttcaagcagggccaggccgttttttgcaatcagcgccactgcgatccccgctccaagggcgatccatgcgtaggaagaccgcattgcttctccaagctgcttaaatccgatttctcccgtggcaatcgggacaagaacggcgatggtaataatggtcacaccccagttaatgccttttgactggatggtcggaaataatttctgatcaagcccaacgattttgatgatcaaaaggacggatacagcaaagagcaatgattggttttttgcgataagtgcgatagccaagagtaaaattaaaaataaattcgcttgtgtaaacacatgccatccctcctttaagatgaatgtattcatattcagccgcagcgtgaatacatataaaaaataggacatgctgacgagaggaggaccgttttcgtgaatcaatcttatatcactatttttttcagaaccctctttgtcatatcaatgaccgcagggtcgatagctgcggcctattattcgtttccgttaacttatccgttcctgatcgcccttattctttcttcagtgattcatcctgttgtcgattatttggacaaagtgacaggattcccccgaacgataaatgttctgggcgttcttgctttttttctgctcgcagccttcggcgtcctcaccattctggtagccgaaatcgtaacgggaacagcctatctagcaaaaacgctgcctccgcatatcagcacgtttatttcatattgcgaaaaattgtttaccactcatattcagccgctctataacgagttaactcttttgtttcaagaattggaaacgaaccagcaggcttccatcgtcactcatatccagacactcggtgattctgccgctaaaaatgccgggctcctgctgtcccacattctagagatgatcccgagatttttcgctcttcttcccaatacggcggcggttctgattttttctcttctggcaaccttttttatgacaaaggattggcataagctgaaagccatgcttgttttaattctgccggatcgtgtgacagctaacagcaaagcaatcagcagcgaattaaaaaaagcaatgactggttttatcaaagcacaagccgtcctcgttttcatcacgatggtgattgtatttatcggcctttctctcttaaaggttgaacacgccgcaacaattgcttttttaatcgggcttgtagatcttctcccttacttaggtgccggctccgtatttgtgccctggattttgtatttatcgattacgggccagctgccccaagcaatcggaattggtatcctgtacctcgtcgttcttattcagcggcagctgacagagcccaagatactaagtaaatctatcgggatcgatccgctggcaacactcatcgccctgtttgccggctttaaattattcgggtttttaggactgattgcgggaccggctgtactcgtcatcatccaagctttcatcacaacaggcgcattaaaagaaatatggtcctatatcaccgttcagcaaaaataaaacggcagccgttttttcatggctgccgttttttatttgatgatgatccgcttattcttcgacattcctctcagccatttgaacagaatcggcttacaccagccgcgggtaaacgggataagaagacaggcgccggccaaatctgataaaaagcccggaagcatcagcaatagaccgccaatgaaaatgcacagaccgtcagcaatcgcttctcccggcattttgccatattgaagatcacgctgaaccttataatacacttcggttccttgtttttttgcagctgctgcgccgataatgccagtcagaatcatgaatagaactgtcggcaaaataccaatcagctttcctaaaaataggaatataccgatttctattgccggaaacacaataaaaagcaaaaacaaaaatctcatatccaagccccccacacgtgtaacacgttctgttcaacaaaaggcatgataaagagaaaaggaagggattccccttccattttcacctgtaattaaagaacgctcgcacggccttgatagactgcgcctctggaagcgtcaactgtaatatcctggccatctgtcaaaatagatgtcgcattttccagacccacgataaccgggatgccaaggcttaatccgactaccgcagcatggctagtcaaaccgccttcttctgtaataagagcagacgctttttcaagggatgcaatcatatcacggtcagtgcttttggtaacaagtaccgcaccgtcagtcattttttgctcagcttcttttgcattttgtgcaacgacaaccggaccgtaagctgatttgcgtccaatgccttggcctttagcgatgatatcgccgacagtatgaaccttcattaagttcgtagtgccggactcaccgacagtgccagctgtaataacgataagatcgccgtgttttacaattccgctgttcaatgatttttggacagcatcctcaagcatctcatctgttgagctcgcattttggccgctttccgcgaatacgccagatacgagggcaagctttctggaaatagagtcatttacagtaaccgcaacaatcggagcctgcggacggtattttgcaatcatacgtgctgtatggccgctttctgtcggcgttacgatcgcagcagcattcaggttaatcgcagtatgtgcgacagattgtccaattgcgtctgtaattgtcatgcccacttggtctctgcgttttgagagaatttctttataatttaatgcttcttcagaacgggacgcgatgttatgcattgtttgaactgcttcaaccgggtaacttccggcagcagtttcaccagaaagcatgatcgcatctgttccgtcgaagatcgcgtttgcaacgtcacttgcttccgcacgagtcggacgcgggttgcgctgcatgctgtcaagcatttgtgtcgctgtaataacaggtttgcccagcgcgttgcattttttgatcagttctttttgcacaagcggcacttcttcagctggaatttccacacctaagtctccgcgcgcaaccattaagccgtcagacacttcgagaatcgcatcgatgttgtcaacgccctcttggttttcgattttagggatgatttgaatatcctgagcgttgtgctcttcaagaagctcacggatttcgagcacatccgtagaacgtcgaatgaaagatggtgcgatgaagtctactccttgctcaataccgaaaacgatgtctcgcgcatccttttcagtaatacccggaagattgacacttacgcccggtacgttaacaccttttttatttttgagtgttccgttgtttaatacttttgttttgatttcgcgtttagcggcatctacatcaagtacctcaagaccgataaggccgtcatctaacagaatcgttgaaccttgttcaacgtcatggactaaaccttcatatgtcactgaaattttatctgttgttcctacaacctcgtccattgaaataatgagctctttgcctgtttcaagctcaataccgccgttttccattgtatgtgtgcggatttcaggaccttttgtatcaagcagaattccaacgttcttgccaagttttttacttgcttcgcggatatttttaattcttgcaccgtgctcctcaaaatctccgtgagaaaagtttaatcgagccacgttcattcctgactccattaatttcgtaagcatttcaatactttcacttgccggaccgatggtacaaacaattttagtttttctcatttggttcacttccttctgaaatcttcagccttcatctgcacattagatagacagttcttttgaaagctgatacatgttttgctcaactgtgtgttttgtctcaagtatttctataatatcatggtctacaagcttattgttttgtatacctacacagcgtccgccttttccttcaagcagcagttcaactgcatatgcgccgagacggcttgccaacacacggtcagcagcactcggagaacctccgcgctggatatggcccaatacagataccctagtttcaagatttgtttcttcttcaatgcgtttcccgaattcaacaccgctgcctacaccttcggcaacaataataatactgtgcttcttgccgcgttcgtggccgcgttttaagcgggcaatgatttcgtgcatgtcatagtctgcctcagggattaagatcgattccgcgccccctgcaagaccggcccacaatgcgatatcgccggcatgacggcccattacttcgattacatatgtacgttcatgagaagtcgctgtatcgcgaatcttatcaattgcgtcaattactgtatttaaagctgtatcgaaaccgattgtaaaatcagtgcccggaatgtcattatcaattgtacccggtacacctacacatggaaacccgtgttccgttaattttttcgcacccatataggaaccgtctccgccgataacaacaaggccttcaataccaagcttcttcaagtttgctatccctttttcacggccttcaactgttttgaattcaggacatctcgccgtataaagcttagtccctccacgatgtataatatcgcctactgatccgagttcaagcttttcaatctttccgctgatcaatcccgcgtatccgttgtaaataccgtaaacttcaacgtcatgatagatcgcttttctgactactgcgcgaactgctgcgttcattcccggggaatccccgccgctcgttaatacccctatacgtttcattctccattcacctcagcaacatatatgattaaacataacatgatcattgccctaaaaacaatgaaaagggatctccatcctccctatgaaaccttacctattatacaattaaataaattgtttttaaataaaatttaaggaatgtcacaaaaaataaacgtgagccaaaggcttcacgtttatttagtttaccccgatatattgatcttcaaccgagactttgccaattgctttatatttttcatagcgctgctgaactaattcttcttcgctcagcttcagcaaagtttttaacgattgtttaagggtttcgtccatatagcttgcctgcagcttcacatcatggtgcgctccgccttttacttctttaatcatatgatctataatacctaattcttttaaatccggcgcagtgattttcattgtttctgctgcttttttagcaagactggagtccttccataaaagtgccgcggcaccttccggagaaataacagaataagtagagttttccagcatatgcaaatgattgcctacacccagaccaagggctccgccgcttccgccttcaccgatgacgatacagataacaggcactcgaaggccggccatctcaaacaggtttttggcaatagcttcactttgtcctctttcttcagctgctcgtccagggtatgcccccttcgtatcaataaaacagataattggtctgttaaatttgtcagcctgtttcatcagacgaagcgcttttctgtagccttcaggatgcggcatcccaaaattgcggactaggttttccttcgtgtctttgccgcgctgatgcccgattaccgttacagggaggccgtggaacttcgcaatcccgccgacaatggcttcatcgtccccgtacgctctgtctccgtgacattcaaaaaagtcggtaaacaggtgttcgatataatcaagagttgtcggacggtccgccagacgcgcgatttgaacccggtcccatggcttcagatttttgtaaatatcatcctgaagcttagcgagacggtcttcgagccgttcgatttccgcacttagatccatatcggaatcttgggtgaatttttttagttcggcgattttggtttgcagttcaatcaccggtttttcaaattctaatcttggagccactcaatgtcacctcctgtttgatgcatatccagcagattttctaacgtttttttcatatcgtcacgatgaataaccgcatcaagctgtccatgttttaataaaaattcagccgtttggaagtcctcaggcagtttttctcctattgtctgttcaataatccgtcttccggcaaaaccgatcagcgcgccaggctcagcgaaattgtaatcgccaagggatgcaaagcttgctgatacgcccccggtagtcggatgcgtcattactgaaataataagaccctgttcttcactgaacagttttaacgcagagcttgtcttagccatctgcatcaaacttaatacgccttcctgcattctagcgccgcctgaagccgtaaaaataataaacggaactttatcagcttttgctttttcaatcgcaagcgtgattttttcaccgacgactgaacccatgctgcccattctgaatgaagagtccatgacggcgactacagccgggtgtccgccgatggtgcccttgcctgtcacaacagcctcgtttaaggatgttttctcgcgatctttttcaagcttttccagatatcccgggaaaccaagcggattttccgagagcattccctgattgaattcctcaaaggatttttcatccatcaagctttcgatacgctgttttgcgttcattgggaaatgataatcgcagttcatgcatacccgcatatttttatccaactctttagtgagcatgatttttttacacttaggacattttgtcataatgccttccggaacatcgtgcttcgcttgatcagatggtacggaagcatactttttctttttcgtgaatatatcctttaacaaatgattacctcccttttgtgaagggttctcttcaccgcatgtcatcaaacagatagacttgctaataactttaccgaaactattgtactttttttgtcaaacgctgtcatcctcaattcgacaactttttattcgatgacgtgctcggaaaggcttgtatgaaatcagataaggtgttgaaacgacaaggttgacagcgcattcaaaaataatgttaaacccggctgaaatttttttaaggctaaccccctaaaaaaatttcagccgtcagtttaacttgagaacagcgcgccggtctccgccaacgcgctgccatttttggaatgaattaaaattattcaccaataatcgtaagttttcttgttttttctgcgacttcctcagggtcaacagtgattcttgcaacacctgtttccatcgcagcttttgccacagccttcgcaacagcaggcgcaacacgtttatcaaacggtgcagggatgacataatctgcgctaagctcatcttctgaaaccagtgaagcaatggcttcaaccgctgcgattttcatttcctcgttaatatgagtggcacgcacatcaagtgctccgcggaaaataccagggaatgcaagaacattgtttacttggttcgggaagtcagaacggccagttccgataacgcttgctccggcttcacgcgcatcttccggcatgatttccggatttggatttgccattgcaaagataatcggatcttttgccatgctttgaaccatttcttttgttaacgcgcctgctacagagacaccgataaatacgtcagcatcaacgatgacatctttcagagaaccgtctttgcgatcttggttcgtgaacttcgccacttcatttttgacatcgttcatgccgttcgggcgcccttcataaatggcccctttggaatcgcacatcacaatgtcgcgaacgccataatgatgaagaagcttgataatcgcaatgccagccgcacccgcgccgtttgcgacaactttaatggatgacatggattttccagacagtttcagcgcgttcacaagacctgctacggttacaatggcagtaccgtgctgatcatcatggaaaaccgggatgtttgtttcttttttgaggcgctcttcaatgataaagcagtttggcgctgcaatatcttcaaggttgacgccgccaaatgtcggttccagcaattttacagtttcaacgattttatcaacatcgtttgtgtttaaagcaatcgggaacgcatctacgcccgcaaagcttttgaaaagaactgctttcccttccataacaggaagcgccgcttcagggccgatgtttccaaggccaagcacagctgtaccgtcagttacaactgctaccatgttccccttcattgtataatcatatactttgttaatgtcttcatgaatatccttacacggttctgcaacacccggagaatacgcgaggcttaaatctttcgcatttctgacctctacttttgatttagactccagtttcccctggttgactttatgcaggtgtaatgcttcttctcttaatgacattctcctaaacactccttatggatattttttgattcgtatactgctgcgttgattgctgcattctgcggagtaaatctatctgaatatttaaacaggatcacataattgctccaattgtataacaaaaagcgaatcgttaccactgttttaaaacgacgtttttttgacccaacagctcttttaagcgatataacacctggtgatctgcattgatatggaacgactcaggtagcttaatcgtctgtttttgcctttcataatagagataaacgcctgtttcccctttatgctccagcaaaatgcgcttaatctttgccaggatctcctggctgtgctgactgctttctatttttatataaaccgatggcgctttttctgcatccatatcttctaataattctgcccgggacatgatgaattggatcttatcttgtctaacttcacatttccccgcagtgaacaaaagagcgccttctcttaaaacgggagaaagctgtctgaattgttcagggaagactacggcttctatctcgccggtttcatcactgagcgttaaaaacgccatgttttgacctgttttcgtccgaatcgttttgatcttcgacagcagaacgcctagtgaaagctgccttttgactgcccgctgagcctgcagaatagagactgctccttgcgcagtgagctgttttcggaaggcggagaggggatgatttgaaaaataaatgccaagcgtttccttttcaaacgcaagtaaatccaccagaggaagctcctccgtctccacatacttcggcttaattgaaaacgattcatctaaaaacaatcccatttggtcatcgtccgcggcgaatagctcagcatgttccaaagcaacatcaatggatgcgagcagcgtggcccggttttggccgaattcgtccatcgcaccagaaaagataagtgcttcaagcattttgcgatttacgctttttgacggcacgcgaaagcagaaatcgaaaagatcttcaaatggtttctcttttcttgctttatatatatctttgactgctgagacgcctacactttttatcgcgcggaggctgtatctgacagatccgttttcaactgtaaacggaaaactgcttttattcactgacggaggaaggatacgaatcccgctcccctttgcttcgtaaagatattgagagattttatcctcattgccaatgacgcttgtcagcaatccgcacataaaatataacggataatgagctttcaaatacgcaagctggcacccgatcatgctgtatgccaccgcatggcttctgttaaagccatagtttgcgaatttgacgattaaatcgtagacctcatttgcagtgtctacagaatactccttttttaagcacccttcaacaaaatggcttcgctctctgtccaggatttcttttttctttttgctgaccgcccttctcaataggtccgcttcgcctaaagaaaaccccgccatacgggaagcaatcatcataatttgttcctgatacacaatgacgccatatgtatcttccaaaatgctccttaaatcttcatgaggatagtgaacaggcgcccggccgtgtttacggtcgataaataacggaatattttccatcggacccggccggtacagtgcattgaccgccacaatatcttctaggcccgaaggtttcagccgtttcaagacgcttctcatccctgcagattcaagctggaaaatgcctgtcgtatccccttttgacagcaaggagaacgttttgtcatcgctgtaggaaatacttgaaaggtctattttaatattttcttctttttcaatcattgaagtgatggattcaataagtgtcagattcctcaaacctaagaaatccatttttaaaaggcccaagtcttcaagatggtccatcgcgtattgcgttaaatagatcccttcatgcccttcttgaagcggaacaacatctgttaacggttcttcactcaggacaacgcccgctgcgtgggttgatgcatgccttggcagcccttctattttccgggcaattgaatagacttgctgaagcaggcttgactcccgaagccgcttatccagctgcggtgactgctgtctcgcttcatccagcgtcattcccggtcttgaaggaatgagttttgcaagctgatctgcctccttcgggctgacgccgaatactctgccgacgtcccggagcgccgcctttgccgcaagtgttccaaaggtgataatctgtgcgacgtgcattgcaccgtatttctgctgaacatattgaatgacttcatcccttctagtatcgggaaagtcaatatcaatatccggcatgctgacgcgttcgggatttaaaaatctttcaaacagaaggtgatgcttaatcgggtcaacatctgtgatatacagcacgtatgccacaagagaacccgccgcagaaccccttcccggtcctgtaacaatccctttttcatgggcgtgcttcataaaatcccacacgatcagaaagtaatcgctgaacttcatccgcttgatgacatcaagctcatattgaagacggcgaaggtatcgttcatcaggcttgccgaaacggctgcggagtccctccatacagatatccgttaaataatcatcagcggacgttccgtctggggtcggaaaagacggtagacgggtctgcccgagactgacgtcaatgcggcattgttccgcgatctctacagaagcttgcagtgcctcgggatgctctcgataaatgttttgcatttcttcgtgtggtttcaaatcgagatcaggcaaatcttcagcgggtgcatccgtcagtttttcccccgctttaatcgctttcaaacaacggtaggcagccttatcttccttccttatgtaatgcacatcgcctgtggccgtaacagggatacccgtttcttctgacagctttagaatctgctcagacaagacttgattccctttaaaaggctgataggagaaataaaaagctccctttccgaatatagactgaaattccagcgaggcttgagcagcctgttcgaacagtcctccttcaagaagcgtttcaatatatcctttttcgccgggcgttattgcgataatcccttctcgataactgtgaagccatttcggcttcagtccgccttttgatttagattgcagaacgctgctgattttcagcaggttttgatagcctgtatttgattttgccagcaggacgagcgggtatgcttcaagttcgctgtcatctgtaaaaacagaagccgtcaaaccgattattgggttgatccctctcgtcttgcaagctttgtaaaattgaatagctccgtacatgacatgatcatctgtcagcgccaaagacgcatatccgagcctgtcagcttcactgacgagctcttccacagccgcggcgctgtttagcaggctatacccgctatgcacttgcaggtgaacaaaagacatgctatcacctctttctcattacgattcatttcttccctcattataaggccggtttccaaaagaaacaaatgttcttttttgactcatcatcatacttgtcctgaaagctcaatatgatataaaaggtgaggtgataaagatggatcaggaagcaggatttatggtgaattttatcaatagctacttcattgcgttaggggtgctgatcgggggcgcactcattggagggctcggagcatatttggcaggcgaacccccgcttacagccattacaaagcttgccaaccggttaaaaatatgggcgcttgtcgcagctatcggaggcacctttgatgcggtatacagctttgaacgcggcatactcgaaggcaatacgagagatatctttaaacagcttcttttaattatttcggccatggggggcgcgcaaagcggctggcttattatatcatggctgacccaggagcatctttcttcatgagggtcccccagcattacaaaaaaccgggatggcagcgttttttcgcgggaatgatgtgcggagccgtaatcagctggttctttttcctgtttacttacggaacattccaagaggagcaggtcagcctcatcgaaaagcaaaaagagcatgtaaaagacttgaacaatcaaatttcgatctatcaggaagacctccataaactgaatgaagataataaaagaaaactgctgattcaaagcgtcagcgtcaaattgctgaatggggataaatataaaatatcacagccggataaaacgaaattcgaggagcatgtaaaggatgatatttcagaggtgattacaaaagacatagagagcgtctatcaaacaaaggatctcttgaagcggacaattgaaaataaagtctatatgatcaatgaaaaaaaatacgaggcaaccgtcagagaattgattatttatacgaggctgacagtggaacttgaaatatctttcgccacataattatggatttttttcaaattctccaaacttctgtcgctttttcccattcttttttataaactatatgtgaggcttaatggcgaaaggaaggaggaagggaaatggaggtttacagtgaccgtcagttagcaaaagatcaagcagcccgtctcagacaaggtttttctgcatatgccgaaacaaactcactcgcttccctcatcaaaaaagaacttcaatcacacaatctccaagtctacgaggaccttactgatttcggctgctggttcatccccgtcacagatgaacactaagagagagggtctcccctctactcgtgttctttacataatgtttccagatcagctaaaatccgatcagcttcatcccagctgtaaatagaggcgcctgaagctaacggatgccctccgccgttatatttccgggcaagtccgttaatgacaggccccttcgaacggaatctgactctgatttgatcgtcttcttctacgaaaaacacccaggcgcgaatacctgagatattgccaagcgtcccgacaagctgtgacgcttcagaagccgttgtgccgaatttttcaagcgtatcctttttgatgaaaacagaagcggccccgttttcggacaaagacacattttgaaagataaagccgttaagcttcaccacattcagttttgtttcatacaattgattaaacaactctgaggaagagaatggatactgaatgagctcgcctgcatattttaatgttttttccgtggtattcggaaataaaaagcgtccggtatctccaacaatgccggcgtagatcagctctgccgctttcgtattcagcttccagccgtgctcttttccttctaaatacagctcgtaaatcatttcacttactgagctggcgcttgtatcgacccagagaaggtcaccgtatggatcttcgttcggatggtggtcgattttcattagtttggcgcctgaaggataacgctgatcgtctattctttcctgatttgccgtatcgcagacaatgacaagtgcgccttcatatgtttcattgtccacctcatcaagggaatataagaaagagagggacggttcaggcgtgccgaccgcaaaaatatttttttcaggatatgtttcacgcaggatttccgtaagcccgcactgtgatccgtaggcatccggatcaggacgcacatgtctatgtaagataatcgtgtcatataatgatatggttctgatcaattctgttttcatttgatactcctttattgtttttattcattaaatcacattctctgccgacggaaaagaaaaataacgtcaaaaccaagcccgtttttgtataaaatgggtttgtaaacttttacgatggaggatttcatttatgctggttcttgtttttttgattgggctttccgcctgcttttatgtgtactataaagtaaaaggcgtacgggcaaagccatctttggcaaaagaaatatgttcagcaaaatcaagcatggccttagggtcactagtcctgttctacgggctcaaccaaatgatattattccattcagtattaacgttaataatcggcggtatctttatcgtcataggagcaggaagcgcttgggcaggttataaagcctttaggcattacaatccccttcacgccaaagaagctgaaagagatcacgcgtaaggggcgcctgaacgtcccttagcttctttccatcagctgaaccatcagcatcgctttagacacgatatgaccttggctgtgcacttccacttccattttcccgaactttctgccagcctccaagatgcgaggtttgacttcgatgactgattccatctgcacaggcttcaaaaagaagatggtgatgctctctatgacgagttcgccgcgttttttcgagcgcaaaaatcggtttgccgcttgcgtcaaaatggtcgtaaatacgccataagaaatggttccaagctgatttgtcatttgcggcgtgacttcatactcgtaaaccgtttgatcttctttatcatcaccctcatctttaaacccccttgaaacgatatcatcaagcttctccccgacctgcggctgcttttgaatcatttgaagagctttcaatacgtcttggcggctgatcatgccgatgagtttttggtggccgtcagtgacgggaagcacttcgatcccttcccataccatcatttgcgcagctgaagcgacagatgttttcccaataaccgtgacgggatttttggtcataactttttctatagatgcatttcggtcatggccagcaatatcttttgatgtcagaatgccatggattttcatttgatcgtcgacaaccgggaagcggccgtgccccgtttcaaaatttttctcataccatttttcaagtttatccttaggcgaaagatataccgtgcggtcagcaggtgttaggatgtcctccaccaaaacaatttcttttttgatcagctggtcatatattgcccggttaatcatcgcggcaactgtaaaggtgtcatagctcgtggataaaatcggcagttcaagctcatctgccagctgcacaatgctgtcatccgtgttaaagcccccggtcaccaatacggccgcgcccgcttcaagcgcctgcctgtgtgcattgattctgtttccgacaatcaaaagattccccgctgcggtgtaacgcatcatcgcgtcaagctccatcgcgccgatgacgaatttattcaatgtcttatggagccctgccctgcctccgagcacttgtccgtctataacatttacaacctctgcataggtaagcttttcaatgttctcttttttcttttgttcaattctgattgtgcccacacgttcaatcgtgctgacaaaccctttattctctgcttccttgatcgctctgtacgcggttccttcgcttactttcatttcctttgcaattcttcggacagaaattttttcaccgacaggcagtgaatcgatatacgttaaaatttgttcatgcttcgttgccaagcctttcacctctaaggacagtcttcttgtttttattataaggtttcaaaggatttatacgcaatgaggctggaaaataaaaaagaagcccgaccggcttcttacagcgttgatttcgtcccagtcaagcgcaaggaccccgtggctccttttacatcgtaaagcggaaaaacctttatttttcttttaaatggacatcaaccgctgtcttaacaatatttcgattccctattttagataaaacaaataaaactgcaaatagccatatcgcccctatggccgtatagatcaatggataaacagctttgtttgcgatccattcatttattaatgttctggcatttaccagaataataaatcctcctacaagcacacccatcaattgcggatgaaacttctgcaccagccatgctgcgataggggcagcgataattccgccggccattagtgaaaacacccataaccaattgacgtcctcccatcctaatgaaataagaaaaccggcggttgcagatacggcgatggcaaattcacttgtgtctacagtcccgacaactttcctcgggctcaagcctttgcgggataataaaatcggagtggtcaccggtccccagccgcctccgcctgtggcatctgcaaaaccagcgatcactcccaatgggatggattgttttcggtttaacggcacatgcttcttctcaagagccggcttatattgaaataaaaacctgatcaatacatatccgcccagaaggagcaaaaacaaagaaatatagggtttcgccacatctccaggtaattggctgaggaatgccgcgcctaaaaaagcgcctatagagccgggaatgacaagctgataaacggtttgtttgtcaacattgccaaatttaatatgcgacactcccgatgcggcagtcgttacgacttccgctaaatggacagaagccgaagccacagcaggtgtgatgccaaacgccaataacaaagaagttgaggtaaccccataagccatacctaacgaaccgtctattaactgcgacaataaaccaataaatgcaaaaacgattaatttcttcatcagaacaccccatctatatcaatcagatatttttgactcttcattcgaatctaacaatctcttggcgctttcatataaaaaataagaggctttgataatggcagtttcatcaattgtaaatgcagggtggtgccaatcatgatcaccgtctgttccaaaaaacgcaaaggatcccggaatatgctcaagataataagcaaaatcttcccccgcggttgatgggtcgggatcaatgacttgaagtttcgctttatgcgcagcgtctcgcaccagccccgtaattgcctcatcattacaaagcggcggcggtccggaatgccacttcacatttgcctttaacgagaatgcggcagaaatctgctctgcgactgccaaaaaacgctgtttcacttgatcacgaacctctgaatcaaatgtacgaacagtgccctcaatgacaactgtatccggaatgacattccaagtgctgccgccgttgattttccctacggttaaaatcgcgctttgcagcgggtttacatttctgcttacaatcgtttgcagggcgacaataagctgagaggcgccgacaattggatcaaaaccattatgcggcaatgctgcatgagcacctttcccttctatctttactttaaatcggtcaacagcagccataagcgggcctgtttttaaccctacagtcccaaccgcgatatccggtttattgtgaagtccaataaccgcatcaatgccatccagttggccgtcctctatcacttttgcagcgcctgcacccgcttcctctgccggctgaaataataaacgaacctttcctttcagactgtcttgattttccttcaataaaaagaccgcaccaagaagcgctgccgtatgaaaatcatgaccgcacgcatgcatgatccctttatgtttagacgcataaggcaatcctgttttttcttcaattggcaaggcgtcaatatcagccctcaaagcaatcgccggaccttctgactcccctgctatgtctgcgaacacacccgtttttagagcagtagggcgaatctgtatccccttttctttaaggcatttttttataaaagcagttgtttcaaattcttcttttgacagttcaggatattggtgcaggtgccggcgaatgccgatgagctgcttttctagcgttgagagatttacgggattatactcccctttcaacttcaggatgtcatttcctgtagtctgatatggataggagccttctatatttctccaataatccaaagacatatgtaccgctcctttccctatcccaatatattttcttcagactcttcaacataagatgaaataaatcggttcaatttatcagcaagaccgcccgccccaaatcttatatacttgctggaaactttcggattatcttctttcaaaaaacttaaaaaagataaaatataaatgcgcctgtaagctacttgtgtaattccgtactcaaaaaaccagttatcaatgacattgtatacgcctcggttgacgccatataggttgttacatttcttgtaaaagcagagatccggaagatttaactcctgatgggaaagcaggctttcttttttgttcggtgccataatcccaatcagttcaaagcgttttgcaacgcaccaaatatcctttttaatttgctttgttaaagactccaaagaatcaaaccttctttcttctctaattttaaagagaatgctgcattcgattttttctccatagatgtctctatgaaagtcaaacaaaaaaatctccaatgtccttttaaggttagagcccaccgtcggtttcacaccgatattcataacccctaaatggaattggtgattgactgtcgccagaactccataaactccattacgcagcccatgcatttttgcatctacatttgccgtggggaatccaagctttctgcctaattgttttcctttcacaaccgtaccggcaatgatcgtcaaaaaagtcagcctcctctctcagcttccgcattcgatcagacgaaacctaatgatgtgatgaatgtaaaacggattgatgctgcggaatgccaagaccgagattttcccgcaatgtcccgccgcgataatcttgacgataaagccctctttcttgaagaatcggaatcaccttttctacaaaagcatcaagtgttcccggtatatccgacccaatgataaacccatccgccgcctcagcgttgaaccaagtttcaattaaggatgcgacacgctctggtgttccgatgaatagagtccgtggaaaagccatttcctgtgctacctcccgcaatgtcagatttctggcttttgcttctctcttaatccggtctgttgtgctttgaaacgcattctttcccacatcgccaatatcgggaaatggctcatccaacgggtaaacactcagatcataatcatcaaaaaaacgagccaaataagtaacagcattttcaatcggtatcaattctgcaaattcacgatacttcttttccgcctcttcttccgtatctgccacaatcgggctgatccctggaaaaatccgcacacttgaaggatcacgcccttcatcagcagctcgccttttcacatccgcataaaacgcttttgtctcttctaatgaattggaatgggtaaaaatcgcatccgcatttttggcggcaaactgccggcctgtttctgatgaacccgcttgaaacactacaggctctccctgtttagagcgcccgatattcaagggcccctctacttgaaaatactttcctttgtgattcaggcgatgaagcttctccggttcaaaaaattgccctgttttcttattgtgtataaatgcgtcatgctcccaggaattccacagcccgcgcacaacatccaaatgctcctgcgcgatttcgtaacgctcagtgtgttcaggcagattggacttactatgattgcgcgccgccccttcctgcggcgaagtaaccagattccagccggccctgcccccgctgatatggtccagcgacattaattgtctggaaatagtgaatggctcagtaaaagatgtagagaacgtccctactaaaccaatatttttggtaaccgatgccagcgcagataaaatggtgatcggttcaaaacggtttaaaaaatgaggaatcgatttttcagaaataaataagccgtctgcaatgaaaataaaactaaacaaacctttttcagctgtttgcgcctttttcatgtaaaattcaatattcgtgctggccgagggatcaacatcgggatgacgccagccgtcagttgttcccccgacaccgtgaatcatggctccaaactgaataaaatctgaacgtgtcatctttttgcctcctttatctgtgcatgattagcaagtgcaagatcaaggtgttcaatgccgatttcagttatcccttgatagtgattgccgcgcccgatttcgaccacaggcacatggcgtaccccatatttcgcctgtaaaatatctcgaagttcctctttctctgaaacatcgatattttggaacgggaaccctttttcattcaaataattcttgacttcctcacaatacgaacagccttttttactccaaaccacaatgttcaaaacatcactcattcttctgaacctccttaacgttttgcagctaaaactgcatcgctcagcagctgataagacagctgtttttcttcagtatttttgatcggtgtaaaaataacaaaatcattgattttgtatgtgcctgataaacgtgttaattcttctgccacttcttcctttgttccggcaataatcccggttttttgcacgatgatgtcatagggctctgtgacgttttccagataggcctcagcctgttcgcgggaaccgacgttgaccttacgcccgtctttcaaatccacttttatcgattcacgcgacacaatatgtttttccgcttcttcttttgtatgtgccgcaaaaacagcgggggcaagatgaaattcagcctcagatcctggcgggagatgcgcgtcaaatgctcggcgggcttccttcagcacttcctcttcaccgttaataaagtaagcaaagacaaaagagattcccagttttgcagccgaaatggcactctctgcgcttcctcccaatagaaaaatacccggcttctgatcaacctgcggcctaggacgcaatgcggcatagcggtgggtatcaggaaaatcatcccgaacgaaatgagtaagctcctccagtttttcatcaaactgacgcaccggttttttatattcggcctgcagcgcgtctgtggacagctgaaacccgccgggcgctttgcccactccaagatctatacggccgggagctaacgctgatagaagatggaattgctccgctactttataagagctgtaatgctgcagcatcactccgcctgatgctaaacgaatttttcttgtgcttgcagcaagatagcctaaaagaacctcgggtgcagaccctgcaatctcatcattgttgtgatgttcggccacccaaaatcggtgatatccacactcttcagccatttgtgccaagttcactgtatgctgtaatgtatcagctgctgtctccccttcaccaatcaagctttggtctaaaatacttaagcggatcatatcaccggctcctttatgtgttcttttggttcaaataaatattccggcgaaacacggcggagaaactgcctcgttctgtcttttttggtatggcgaaagacttcctccggggttccttgttcaacaatgactccttcatccataaaaacaacttgatcagagactcttcttgcaaactccatttcatgtgtaacaacaatcatggtggctccggttttcacgatttccagcattacctcaagcacttcaccgaccagctccggatcaagcgctgccgtgggctcatcgaacagcagcacatcaggatgaatggcaagcgcccttgctatccctaccctctgcttttgtcctcccgataactgactcggataagcgttcaatttatcttgaagcccgacctttctcagttcattttccgctacggcatacgcgtcttgttttctcattttccgggcaatcgtcaagccctccatgacattttcaatcaccgttttgtgagcaaacaggtggtattgctgaaataccattgccgtctgttttctgagccagtgaacctcttttttggacggaaagctgcaattaatcactttgtcatgtatagaaatgatcccttcgtctggacgttctaataaattcaggcaccgtaaaaaggtggttttccctgatccgctcggcccgataatcgtcacaacttctcccttgcgtaccgtgagatttatcccttttaatacatggtggatgccaaactgtttatggatatttttaatctcaatcataaagtgcctccttgaaatctggctgcctttctctctaatactccatttgcggattctaggattagagtcagcacccaatagataatcgctgctccgataaacgcttctaaaaatgcataattatcagaagcaacgatagtcgccgtccctgtaatctctgggacagccactatagccgcgatagaggtggtatgcaaaaagccgatacccaaatttgtgaagtttgggatggaaaccatcagcgcctgcggcaatattacacgccgaaaggtttggctgtgtgtcaagccgattgaataagccgcttcgacctgtccggtatccatcgccagaatgcctgaccggatgatttctgtgagataagctccggcagttaaagacaaggccatgatgacaaacatggagaccggtatctcattggcggaccagccgagatgaaaaaaactgctgacttgatctgcaacaggaggtatccctaaataaatcaacataatgtgaaggattgcaggtgtacttcgaaagaaagacacataaaaccttgagcaagccaccaagcccttaattctaaaaattctaacaattatatttccaagagccacgagaaatccaaacacaatcggcaaaacagccatcatcaatgtcagaggaatggtctttaccatttctttcatggcggaaacgataaatggaaagtcaaattgcaatcttctcccccctcatccgaagaaatatatcaatgtatgttcatgtcaaaaacagtaacaatccttgtttgattcttcttgattcgtttttctgccactcgaaagaaccattcgaataaaactgcaacagcataataaacaatcgatagcgcaatgtaaacttcaagagaatggttgcttgaggtaatcagtgtttggccccttccggacatatccataacacctattgaaaaagctagagatgtatcttttaaagaactgatcaccatgtttcccatattcggaaatgcctggacaagtgcctggggcagaacgattcgcctgaaggcctgactaccgcttaagccaatactgtacgccgcttccgtttggcctttatctacactgcccacccccgctcgaatgatttctgcggctgccgctgcattgcttaacgcgtaggttgcgacagcagcataaaacgggtccatttttgatgtatcaatcccgataagtcccgtaagcgccgggattccgtaaaacacgatgaaaagctgcaccatgataggcgttcccctgaaaaatgagatatacacttttgccaattgatttacaattggaatattgtagatgcggggcagtgccagaaagagtcctaatacaaaaccgaaaagcaaggacagtgttaaaatgtataatgtaaccggtaaataagcggttaacgtcggcacaaaatctccaatcatgttcatatcaaacgctttttccatcactgctccctctcttttcacctaatactgctctttggaatagtcgtcaccaagccattttaaactgagttttttcagcgttccgtcatcaatgatttcctgtaaggctttatcaatatcgtcacttaacgtttgttcatttttgttaaacataaaatacactttggcatttgaaagcacatgaccgacggttttttctttaatagcgctcgtcttgttttgaaagtctactgcaaaaggcgttgagatcgttgcgtccgcacgccccgatttcagctgattcgcagtctcatttgcgccttggccctcataggcaatctcaaacggccgtccattatcctcattccattttttcagtacaagcgctccgttggaggttgcactcgtaatcacccgttttccttttaagtcttcaattccacggatcgtatcgttattttgaagcacagtaatttttaaaggaaaatggttgtaagcaaccttgttaaacagaaattttttctcacgctctttgcttttctccatttgatgtgccacgatatcgactttatgctgtccgaggctgacaagcaggttggaaaattccatcgttttaaatgtgaatttataatgtggcaggcgcttatcaagctctttgatcagttcgacatcataaccggttaaatcgcctttttcatcaataaagcaaatattcggaaattgggttccagttccgaccgtgatcgtctgtaccttcttttgcccggctcccgtcgtttgactgcctgcaccgcaagctgacagaactgttataagcgaaaataatattgccatgaatgctgttttcgttttcatctcatcgccccatttatttttcaaaacttgattttgaataatctgccccgagccattttcggcttagtttttttagcgttccgtttttctccagctttttaatcgcttgatccgtgtcatccgccaaggtttggctgcctttattaaacataaagtacacctcggtatctaataacacgtcaccgactgtcttttggcggaaggcgtgcgttttattctgaaaatcgacggcaatcggtgtagctatcgttgcatctgcgcgcccggtttcaatttgattggcggtatcattgcttccctgtcccgcatatttcaaatgaattgggctgccgtgcgttttgttgtactttgtaatataatctgccgcatttgacgtggcgccaactatgactgtttttccgtgtaagtcttttaatgtatgaatcttgtgattatcctctttcaccgtgatgtacatcggcgagtagttatatgggactttatgatacaaaaaacgcttttctcgttctttatttttggccatattgtgcgcaatcacatcaatttttttatttccgagactcgtcagcaaatttgagaaatccatcgttttaaattcaaatgtatattgaggcaactccttatcgatggctttcatcacttcaatgtcatacccggtcaattcacctttttcatttaaaaacgcaatattcggaaaatctgttccagtgccgactatgaccgtttgagcctgacgatctgttttgttatttgtttgcgaacatcccccgccaagtaatgcaaacactgacagcagcaaaaccaatcctttacgcttattcataggctgcctcacatcatgcccagctgggcgcacctaaaagcgttgggttaaatcgttccggaatcagaaccttgtgcatcatcacacctatgtccccgtctttttcctgctcaaaatacacttcataccctctccttctgtacatgtcagcaagccaaggatgcttgcgcgccgatgtgccgagtgtcagcgcaggagccttcagcatatctcgaagcactttttcttcaacatacgtaagcagcttacttccggcgccttgccctttatattccggcagtgtcgcaaaccaccacacaaatggatattttgaaggaggcgtctcactctcccacgggaacctgattgtaatcgttgaaatcagcttcccatcccgctccagcacaatcgctgaatgatgttcaatattttctgataccatttggatatcagctctcgtggatggccaatcaatatccagctgccgaatgggctgaaatgcgctgttaaccagtttcaacagctccgatgcatcttcaacagttgccagtcgaaaaatatcatcactcatttttgtcactcctcttcacaatatatataattcctatttgtttactaatcttttattgtttatactataaagcatactctgatctttgactaatcaaaaaaagtaaaccttcacttcagtaattttaatgatgaaaaacaggagggagaacattggagttacgctcaatcaaaacgtttcatacgattgtaaaatttggaagcttctataaagctgcagaaatactcaactactcgcagccgacgatatcgatgcgtatgaagcaattggagcaggatttaggcgtactgctgtttgaaagaggaaaaagcctgcagctgacaaaagcagggaaacttttttatgaacgaacaggagatcttttgatgcaatacgaggcgcttaaacacaacctctccgacttaaaggaagaagaggcaggcattatcaacataggggtttcagagccaaccgccagtctgatattccccgagattttaaaggatttcttaaaggattacccaaagataacagttaatatcaaggttgatgacgccaatacctgcagtcaaaagctcttagacgggacgattgattttgcagtctgcggcgagccggagctgattcttgaaaattactaccatccatttttttatgacacattaaatgtgattgtatctgagcaacatccgctcgctgagaagaaggctgtccatttgtctgatttagcagaagagcgcttcatatttacgcccgccaattgccccattcgcttacaaattgaacagcatttacatagagaactcgggaatcgttacaaaaaaatggagctcacaagcagcatgtcacatgaatattacgtacgtgaaaacatcggaatttcaatctttaccagcaccgcacattctaaaccgttcaacggcactaaagtcattccaattctgaacctggatatcaccccgcccatagggctgttgacaaatcaaaaagaagttcattttgaccgcgccacgaaggacttgatcgcccggataaccaaacgttttcagcagcgcagcaaagaattggaaggaacctctgataagaccattacaggataactgaaaaaataaaaaccacctcctgattcatcaggagatggtttcacggtttaaagctcgatcgtctcaccgaccgacatgactttgccgactccgcccggcaggctgtcagcgaatgcttctgggtcttgttcgatgaccgggaatgtattgtaatgcaccggcacgacctgttttgcgcgcagccattcagcagcaagcttggcgtcttcaggccccattgtaaagttatcgccaatcggaaggaaagcaaggtcgatatgattcaattcgccaatgagtttcatatcagagaaaagtgccgtatcgcccgcgtggaaaatcgttttatcttctacagtcagcaaaataccggcaggcatgcctgtgtaagtgatcgttttgttttcttcatctgtgatggctgatccatgaaaggcctgtgtgagcttcacttttccaaaatcgaactggcgggagccgccaatatgcattggatgaacattcaagcctttccagcctaagtacacagcgagctcgttcggggctataaccaacgcgttattttgcttggcgatttgttcagtatcaccgacatggtcattgtggccgtgcgttaataagatgacatccgcttttacatcctccggctttatatccgttaatgaattccctgttaaaaacggatcaaaaataatatgatggtccttcgtttccactgtgattacagaatgtccgtgatatgtcactttcatttctttcacctcgtcacatgattttgatttttttattttccctttttaaaaagctgaaaaacttatgttgtttgattcttgttaatgacattgaggccaccggtggcttcaatgacagtccctgtcacaaggtctgagttctcctcacacaagaaagcgataatccgggcgatatcctcgcctgtaccggatcttcctatcggcgttttttctttgccgattcgcattctggcttcctctatcgatgcttctttcatgtcgccgacaatgtctcccgggcaaaccatgttggcggttatgccgaattcggcttcttcaatggcaattgtcttcgtcaaagaagccaagcccactttcgcagcgccaaatgccgatcggtgaagccagccgggcgcgtgagccgcaccttggaatccgtacgtaatgatgcgtccaaattgctgttttctcataataggaataaccgctttgaataaatgaaagacggcgcttaaatttccttccagcatgccataccattcatcatcagtataatcggctaactttttacgttcaaatatgtatggtcccgcgttgttaatcaaaaagtcgatccttccgaagcggtttaaggcagcctctgcaatacgcagcagatcttcttttttggtgacatcaccttttacaaattgcagccggtcaagacaatcgggacaggcttccttcaggcggctgactgcctcctcatcctgtctgtaattgactgttactgaatacccctttgcaagcaacgtttcagtcactttgcggcctaaacccttcgaaccggcagtaattaaagcatgtcgcacatgaatacctcccaaagcaacgtcgccgctttcaataaagtgtttcttcttctactttactataaaaggcttgcaatatcactttttacactttggcatacaaaaaaagctgcctgtacagacagcttattctgcaggagatgaagactcctgatcaggcatatcgacataaccgctttgatatgcttctgaaatgagccttgttgtctcctggctttcttgttcatcataaatatagcgttccggttcttttttcatcattctgcctcccatcattatagaggtaggttggctataatgacgggattttatgaaggaaattttaacaaactcctgctgctacgcaagctttcgctttttcaagcgcctgctttacctgtttgaatccggtgcccccggcgctcattcttttttcaactgcgtagtaagggtctaacacagtgtaaatatcttcttcgaatagtgtgctcgcctgctgaaactcgccaaacggcatatcgcttaaatagatccctctttcgatgcatgtgtacacaagtttcccgaccacttcatgcgcttctctgaacggcattccctttttagctaaataatccgccagttccgtcgcatttgaaaagtcttgttttgttgcttgcttcatgacgtctttgtttacagtcattgtttggatcatgcctgtgaagatttgcaggctgccctccaccgttttcaccgtgtcaaacatgccctctttgtcttcctgcagatctttgttgtaagcgagcggaagtcctttcatgatcgtaaacagccccatcatatcaccgtatacgcgtcctgttttgccgcggatcagctccgccatatcagggtttttcttttgcggcatcatgctgcttcctgttgcgtacgtatcgtcaagctcgatgaatttaaactcctgcgagcaccataaaatgatttcttcagagaaacgggataggtgcatcatcagcatactgctgttgcttaaaaactccaaaatgaagtctctgtcgctgacgccgtccaagctgttttcataaatggcatcaaagccgagcagttccgctgaataatcacggtcaattgggaaggttgttcccgcgagcgccccgcagccgagcggagatttgttaatccgcttcattgaatcctgaaaacgctccttgtcgcgctcaagcatccagaaatacgcaagcatatggtgagcgaatgaaatcggctgggcgcgctgcagatgtgtgtagcccggcagaatcgtttcaacgttcgcttccgccttttcaatcagcgcactttggaatgcctcaatcagctcgatgatgtggccgacatgattcttcaagtataaatgcatgtcagtcgccacctggtcattccggcttctgccggtatgcagcttgccgccaagaggaccgatttcgtcaatgagcattttctcaatgttcaaatgaatatcctcataatcgactgagaattccaatgctccctcctctgctttttgcaaaagggtattcaggccctctcggattttcaactcttcttctgctgtcagaataccgcattttttcagcatggcagcatgtgcgagagaccctgtaatgtcttcagcaactaaattttggtcaaatgatatggacgcgccgaactcgtcgacccatttttccggtgttttttgaaatcggcctccccagagcttcttcatgctttaatctgctccttcttttttacgatgctgttcacttttgtcggaagtccccaaagctcgataaatccaattgctgcatggtgatcaaatgcatcgtcttttgtatatgttgcaagtttttcatcatatagagagtattctgatttacgtccttctacaattgcatggcctttaaacagcttcacgcggacaatgcctgtgacatgcttttgcgtttcttttaagaaagcgtgcagcgcatcttttaacggcgagaaccataagccgttgtaaatgatctctgacattttttgctcgatgatcggtttaaagtgggctacctctttcaccagtgtcaaatcttctaattctttatgcgctttgatcagtgtcatcgcaccagggcattcgtatacttcccgggatttaatgccgacgaggcggttttccacgtggtcgatacgtccgacaccgtgcgcgcccgccatttcattcagcttcaagatcagctcagaaagcgagtaggaaacaccgtcaatggagacaggcacgccctgttcaaatgcaatttcaatcacttccggcgtgtccggcgttttttccagcggagctgttaaatcgtatgcaccttctggcggcgccgcccatggatcttctaaaatgccgcactcattggcgcgtccccagaggttttgatcgatagaatacgggctgtcaagattgatcggaatcggaatgccgcggctagccgcatattcaatttcttcttcacgtgaccactgccattcgcgaaccggcgcgatgacttctaggtcagggtttaatgatttaatggagacttcgaaacgaacctggtcatttcctttcccagtgcatccatgggcaatcgcctgtgcatcttctttttccgctatttcaaccagctttttcgcgatcagcggccgagataatgccgaaacgagcgggtattttccttcatacatcgtgtgggcctgcaaagaaataagcgcgtaatcctgtgcaaattcttcttttgcatcgatcacgtaggagtttgtcgcgccgacttcaagcgctttctgctgaacaaatgccaaatctttgccctcaccgacatccaggcagcaggcgatgacattatatccttgctcctgaagccattttattgcgacggaagtatcaagaccccctgagtatgctaatacgacttttttctgttctgacatgataaaaatcccctctcaaccgtgtttctattttgtataaaaataaattatatttaataaaaatacattttgtatgtatacactttaacaagtacgtttcgttttttcaagccttttacaaaaaaaacttcacctaaatttcaggtgaagtttcgtagtatttattcatttacttgtcttttctgatttctctgaccacatgtgcaagttcgggaataatcagcttattcattgccagctttaccgcgccgcttgagcctggcgttgagaaaacagcggtatgctgaatgacgccggcagttgctctcgacatgattgcggcagggccgatatcctctgtataactcagcatcctgaatatttctccaaagccgggcagttctttcgaaaacagcggcgttatggcttcaattgtgacatcccgatctgctatgcctgtccctccgtttaagagtaccgcgtctgtctgttcatccatgcagcccgcaagcactgaccgctgcaaagcatccttttcgtcttttacaatttcatatgcggcaatatgatgaccggcttcttctaaaaatgagatcatcagcttgccgcttttatcggtttcatctgtcctcgtgtcactgacagtaatcactttgcaccgaacgatatcgggagcttcttgtttatgctcttgaacgctcattggcccacctcttttatgttttctgtctgtcactatcatgcatcaacaaaaaagcacattcaagagaatgtgctttcatgcgatttattttgctaaacgaacaacgtcgcgcgcaatcatgacttcttcatcagtcggaatgatcatgacttttactggagaatgcggatagctgatgaaagcttcctcgccgcgcacgttattaagcgcaggatcccagtatacgcccatgaattctaaaccgcgaagaacgcgttctctgacttccacactgttttcaccgataccggcagtaaagatgatcgcatcgacaccgctcattcttgcagcgtaagaaccgatgtatttgtggattctgcttgcgaatacttcaagagccgtttccgcgcgctcatttccttctttcgttgcttcaacgatgtcacgaagatcgcttgagaaaccggaaatgccgagcagtccgctttttttgtttaatgtattcagtacttcgtcagccgtttggcctgttttctccatgatgtatgggatcagggcagggtcgatgtttccagagcgtgtgcccattgctacaccggcaagcggcgtaaagcccatggatgtgtcaatagattttccgccttcaacagcggcaatacttgctccgtttccaaggtggcaggaaatcaggcgcaagtcttttaacggacggccgagaagctctgccgcacgctcagttacatatttatgtgaagtgccgtggaagccgtatttacggatgccgaatttttcatagtattcatacggcaggctgtaaaggtaagactgctcaggcattgtttggtggaatgccgtatcaaatacagctaccgcaggaacatttggaagcacttctttgaacgctttaattccaacgatatttgccggattgtgaagcggtgccaattcagaaatatcttcgatttccttaatggtttcatccgttaataaaacagaatcgctgaatttttctccgccgtgaacgacacgatggccaattccgtcaatttcattcaagtctttaataatgccgaattccgttaacttattcagcagcattttaacagctaccgcatgatccggaatatcagttacttctgtatttttttcgccgttcacagaagttgtgaatacgctgtcggcgataccgattcgttcaactaaacccttcgttaaaacggtttctgaaggcatttcgaaaagctgaaatttcaaagacgagcttcctgcgttaattgcaataattttggacatgattgacgctcctttatactctgtatcaacaacttcgtttttcgtacttttttcccggtgaatatcaacatcttctccgaaaaatatctgacttttccatttaaacattgtcatgtcggcttttcaagtcaacttgcgtattgataacgcttacaataagaagtcgttattttcagacacattccctataggttttgtattgatgaacgcttacaatttgcggtttttccctctgtattttgtgtttcaaagctggattcaattcgtcaagtccggtcttcaaaagcataaataaaagcagcttaggcatcgacctcatacggctgtctaagctgcttttaaaacacttacttttcttttttaaaccattcatcaaattgagccatcatatcaagcatcgccttttgattggagaaagacggaagattcgcaagcagaatttgccccggcgctttcgtattctctccttgtttctgaagcacaaggatgcttttggcatgagcttcgtctttaaaaatagattttggcagctgcaacagtgcgttgatatgaaccttatctttgaaaaactgtttcagcttgccgctttgggagctctcaaacaaatgattcggaatcataaaaaataagtagccgcccggtttggtatgcttgacgctctgttcaataaacagatgatgagcgaaggaatggccttcgtcagctttaagctcaaacgcttctgctccttcgtcattcggataatagccgactggcagatcacaaatgaccgtgtcaactggatcgataaacaacggctcaaggctgtcctggtggaaaagctcaagctcttttttcagaaggttcgcttgggcataggcgatcttcaagagcacatcatcaatttcaatgccaaagctgtttgccgttttttcagacagctggttcagcacggtaaacagaaggttcccagttcccaaggctggatcaagaatggtcaattcctttttgtccgccataaacttattcaccaaatagctgatgaaaagcccgatcgtatccggcgtcatttgcctgtttggatgggagatatctttcattcctttaaggacggcaagctgaaaagccttgcgtacccactcatgctcatacgtgccgaattccgctttttcaagcagagcctgaagttgtttggttttctgatcagcaggcagtttcagctgatccgttttttcaagaaaatacatttctcctgcttcggcaagcgcctctatatatgaaatctgcaattcattctttatcataatcgctgcttcgtttaacagctcatacaccgcacctacatggtctttttgcatattgtgttcctccttgccatgaaaaaagctccggcggcagcctggagcttttttccctgcttacttcactaatgccttagcagcctcaattggcttttcatagttcgggtggtttgttgcttcgcttacatattcagcgtaaacgacttttccattctcatcaaggacaaatacggaacgcgcaagcagacgaagttctttaatatacacaccgaacgctttgccaaatgacatatctctgtggtcagacagtgtttccactttgtcaattccgttagcgccgcaccagcgcgcttgcgcgaatggaaggtctgcactgattgtgtagacgttgacatctccaagctttgcagcttcttcgttaaaacgtcgtgtttgtgcatcacaaacacctgtatcaattgaagggataacagaaataatcgttacctttcctttcatgtcagctaacgatttttcttcaaggctgttagtcagcactgtgaaatcaggagcttgatctcctaccttcacttcttgtccgacaagtgtaaccggaccgcctttgaatgtaatttcagccattataattcctcccttttgtatgtatgtctctatcatagtaaagtttcctgcaaactgcaaagtttatgccaaaaaaaagttaactgcggccagcgcagttaacctttttttaataattcatattgttcatttggttttgattttggccctgactttggttcttgttatttttcttgaacatttgctggatgcgttcgagtgtttgaggggctgcgtctaaaattttctctattaaatgggtattttcatctaaatgaagcattctgatgcctgtcgatccgacaattaaaaacgcgatcggcgtaatggacacaccgcccccgcttccgcctccgaaaggaagtttctgttctcttgtctcatcgtcttccgatttcttttcggccggctttccgccaaactcgcttccgcctgcggcgaatccaaatccaactttagaaacagttaaaatcacacttccatcaggcgtttctactggatctccgatgatggtgttaacatcaatcatttccttcaagttttccattgcggttttcattaatccttggatgggatggtctgccatatacgcttcctccttaaactgatgaatcattctttgaagtcattctagccgacggattcttctttaatacggatagctcccgtccgtatttgacgaatttgaaagctgcaagcatagcatgtccaaagcgaaaaaagaatatacactgaaaatgggtcttggaagcaggggcttgaaacgacgggatcacctcatagacaggtttattcacaaagtccaggtggtcgtagagcattgctgcgataccgcccttcacgccccatacagcacctgttaacacacctgtcactgccgcgtcctgaattccgattactgtaacccattctagttttgtgatatgtaaatgcgcgagaaaagacgcgctgattttccgtagtctggtgacctgatgcaaaagcatttcgattttattaatgctttgctgcacatcgttttgtgtaatttttttctttccgctgctttttttcattttagattcagttttttgtttgatatccactgttccgtcttctttgttcaccttaatcgccgggattgtttttttgatccttataaggccaaacagcgccgtaatcttcaaggtcaatttgtcattatcagcggcatgaagatactccagcgcgacatggattttcattctgagaagcagtacgatccctatgagaataagaatggctgtcagtacatacaccatattcttcacttcctctaggagcattatcgccaattcctaaaaaaataaacccggacggaggtccgggttatcggttatttgcggtataatttttcatgcaccacggtggtatccgcgatgtaatcatgaatcccttgttttgtaggtgaaaaagcaacaacgatatataaaatccaaatcttatcaatataccgtccaaccacttcacgaaaaatcactgtactccatgtcagcttgctatcttgcttcacagaaaccactttgaggccgaacaccattttaccaagcgtctgcctgaagtatttagtcattagtgcgaagtaggcaagatacacaataagcgttgtcacactgtaggccgagaaggtaaacatgccggatgttttcggcagatccaatacggtaaagaggggagaaacgagcaaatggtttaatccccatatcacgagccaatcaagcaggaaagcccagaaacgaacccaaaagccagcataggcatgtgtcagctgctccgcttcttgcgggcctttgatgtcattgcgctctaactcttcatatgtcgcgtccattattgttccctcctacttcgcatagagatacatcattctcggcgaaccggattgcgatagaatttctctcatattcaaaaaatcaatttcacttttaaacattttgttcgcgcccatggaaaacagtgagcctaatccgaagctttcctcataagaaatgacagaggcgtttttcaaatccttgtgatcctttttcatggccgtaatggtatcgtcataaaaaccaagctcatcaacgaggttcagttttttcgcctgccgtccgtcatacacgcggccgtccgcaattttctttacctctgctttcgacatgccgcgcccttttgaaatgacatcaacaaagccttcatacgaattatcaaccatcgattgcatgatgtttttttcttctttcgtcatctcacgggaaggagacataatgtccttatgggccccgctcttaatcgtttcataagaaatgccaagcttatcggcaagctttgaataattgacgctttccataatgacgccgagtgacccggtcagggtttccggtgtcgcaaaaaccttatcagccgctgttgagatgtaatagcctcctgatgctgccatcgaacccattgacacgtaaatcggttttttcgtttctttcttgatttcttccagtttcttatgtatttcagcactttcatacactccgccacccggagaattcaccttcagaacgatacctttgaccgtcttgtcatcttttgcgcgctcaaggttttttaagaacgttctgtggttatatccgtctgcaccaagcagactgcttgagtccccattatcctgaatggtgccgctgacctctaatacggcaattttacttgagagactgccgttttccagcgtcttttcctgcgattcatccgtcagtgatgtgagatccgtttgagcgcctttgacgctttcaaagaaactcatagagatgctgacgataatagacacgccgaaaatccccagagcaatcactaatgcaatccatctttttgcattcattttttctcctcctttttcctaaactctctcattatacgattcaatatgaaaaatgtttcacttcatgagaaagctccggcttaacgggctgccggcaaacgtggtacacttatggccaaaggtattttatcacaaatactggatggcagaaaaacttaaatatgacagcaaaggggaaatgggatatgaccgatcaacgccgtaatgtttatttttttcacaaacaggatcaggaaacgaacgaacaagcccgctcgttaacacaattagcggaagagcatggatttaccgttgtgaaccagcactcagacgccaatattatcgctagcattggcggggacggcacatttttgcaggcagtcagaaagacgaattttcgtgacgactgcttgtacgtcggcattaccaaaaaggggaaagctcatttatattgcgactttcatagtgatgagcgagaaaaaatggtcgatgcaatgacgtttgaacaaattgaagtgagaaaatacccgctgattgaagtgacagtggatcaagccagtccttttcactgcttaaacgaggtatccatccgctcaagcatcatcaaaacctttgtgatggacgtgctgattgacgatctgcactttgaaacgtttagaggtgacggaatgattatctcaacgcctacagggagcaccgcctataacaagtctgttgcaggagctgttgttgatccattgcttccatgcatgcaggtatcagagcttgcatcccttaacaataatacctaccggacactcggctcgccatttgtcctcagctctgaccgaaagctgacccttcgtgtggtgcaggacggcaacgaacacccaatcatcggcttggacaatgaagcactcagcacgagaaatgtgaaaacgatcgaaatcaaactgtctaataagaaaatcaaaacagtcaaactaaaggacaattcattttgggaaaaagtgaagcgtacttttttatagaaaataaaaggacaggctgctgcctgtccttttatgatttctcatatacaatctggccgttaatcacggtttttttaatatctaaaagatgaagctgtgcggggtcaatggcaaacggatcaccactgagaactgtaaaatccgcatcatagccttccgcaatttttccgcgtgacttctctttataaatgataccggcgctaccttctgtataaagctttatcgcttcatatacaggtaaacattcactttcattatagcttggcccgttttgctcatgactgcttttcctgaggaccgcggactggatccctagaagcgggtcaacaggctcaatcggggcgtctgaaccgcccgcgcataaaatgcctttagatatgagggttttccaggcaaatgcagtcttcatccggtcttttccgagacggtcaatgacccacggaaagtcgcttgcaacgaaatgcggctgaagatcaagtgcgatcggcatgcgtgctgctctctcgattaattcgttatcaagcacttgggcatgaataagccgatcatgccggccgtttttgggcggatgcttttcaattgcgttcagcactttttcaaaagcaagatctccgattgcatgaactgcaacctccatccctttttctctcgctttgcgaatgagccggccaagggtttcatcatcgtgaacctgaacaccatttgttgatggatcatcctgatatggttctttcaataaagccgttctcccgccaagcgccccgtccgcaaagattttcatcgcaccgaactccacatacgggccggacagcttctccagctgctcccatcgatcgaccgcttcatgatgaacgagcaaatggcagcgaaacggatactttccgccagcggcagctttctcataagctttcaacggcaccgaaacatcaccataataggacaagtcttccgaatgaccgcccgtcaggccttttgtccagcaatcctttattgcagccgttaatgcctcatcaacatagtgctgagagactggcgggacagccttcagaatcaaatcctgcgccttatcaaacaggagtccggacggctctccatttgcatcttttacgatgactccgccgtcagggtcaggagtatttcttgaaattcccgctgcttgaagagccgcagaattgacagctattgcatgccggcatatacgcttgagcaagacgggtctgtctggaaacaggcgatcaagatcatgcttagtcaagtagtcaggtgtcccaaactgattttcattccagccctctccaatgagccaatcgtttttaggaagctgccgctctctttccttcgcagcctgtaaaattgaatctttcgacgtcagtgcggacagatcgagctgaagctgtttctcaccgtggccgatcaaatgtaggtggctgtcaacaaaaccggggaacatcactgcaccgttcaggctgatttcttctgtttccggtgacccgtacttttccttcaaacgttcatagctgccggtgccttttatgacaccatcctcaacataaactgcctcagtccgatcgccttcttcgagcatcgtataaatgaaaccgccgtgccatatcgccttcattcacgttcactctctttctttacgcctttttattggctttgagctgttcttcacgttttcttaattccactcgtctgatttttgcagaagccgttttcggcaggctttccacaaattcaatttctctaggatatttgtatggagcggtaatcgtcttcacatggttttgcagcattttgacaagctcatcactgcgtttttcatgattttgcaggacaacatatgcctttacgatggagcctctgatttcatcagggcttgcgacaacagcacattcttttacttctgggtgcttaacaagcgcgtcttccacctcgaaaggcccgatcgtatagccggagctgataataatatcgtcatttcggctttcaaaccagaagtaaccttcctcatcttttcttgctctgtctcccgttaggaaataatcgccgcgaatttgtgttttcattctttccggatctttaaaatactctttaaagagcgcaggcgtactgaggtgaacagcgatatcgccaacctcaccaggtttgcagatttcaccgtcttcatttatgatctccacctgatttcccggtgtcggttttcccatgcttcccggtttaataggcgtatctttcaaaacaccaaccaaaagcgtgctttctgtttggccatatccgtcccgtaccttaatgccaaagtgcttttggaaaacatcaatgacttcacggttgagcggctcacctgcggaaacagcgctgtgcagggcagaaagatcaaagcgttccaagccttcaaccttcgccattaagcggtattctgtcggagtgcagcagaaaacattgattttgtagcgatttaaaagctctagatatttttctgctttgaatctgccgtggtacacaaaaccggttgctccgctgccaagcaccgctaaaaacggactccatacccacttttgccagccaggggcagcagttgcccagacgatatccttttcagaaatgtcaagccaagcgccggcagaagtttttaaatgagcaaatgcccatccatgtgtatgtacaacacctttcggctgacctgttgtcccggatgtataagataagaaagccatatcatctcttgttgtgtcagctgttttaaattggcttccgtccgcttcaattgataagaggtttttccagccggcatcattttcaccaatagacagtgtaatcagtttgtcagtcgtactgacatcccggaaagcgccaataaattcggagtagacgatagcgccttttacctctgcatgttcaatccggtattcaagatctttcgcgcgaagcatttcggagcacggaatgacaaccattcctgatttcaggatagccaaataaacagcataggcttcaagcacccgcggaaccattacaatcagcttgtctccctttttaaatccaagatcagctaaggccgctccgattttatttgtttcttccatcagcttttcatacgaccaagattcttgcttgcccgactcgtcctcccaaagaagagcggttttttgtccagcggcactgaacttttccatttcattcactaaattatattgcataggggcaattaaatcttcacgttttaacacgaacaactcctcactttctccacccattatacataaatacaggctctttccgtaaggatatgcctaaaagcaacctctgtaaacatagattttataggccgctggtccttttttatattataaaaaatgaaaaggagtggggatacccccactcctaagccattatgtgaaattgtaaattagaattgtcctccgcccatgttttgttgagcaaaagatacaagacgttttgtgatctctcctccaacagaaccgttagcgcgagaagttgtgtctgctccaaggtttacaccgaattcagaagcgatttctaatttcatttggtcgatcgcttgagcagctcctggtactaaaaggttgttgctgttacctgagttattgttagccatgtgtctcacctccttgtgagtatagaatgtgtcaaaacacatggcttcattcagaaaaactttggtaattgtatacaggagctgaaaattgatttaaaagagttcagcgaatttatcgttagcttcttgttcgctataaagggtcattgtctcaatgttatctaccgcttcttgaatatacggctcgaaatcaacaaagctttcaaagtgttcaattttctcttttttagggcgtgttttcgggcttggcggtgtaaagatcgtgcagcagtcttcaaatggctgaatgcttgtctcatatgtgccaatttcccgtgatttttcgatgatttctgttttgtccatggcgattagcggacgcaaaatcggtgttgacgtcaccgcattaattgcatacatgctttcaagcgtttggctcgctacctgaccgaggctttctcccgtaataatggcaagcccgtttctcttttctctgattctgtcggctatctgaagcatgaggcggcgggttgccgtcattgtgtaattttcaggaatttgtttttggatgagctcttgcgtttttgtaaatggaacaatatgaagtgtcatgcttcccccaaaacgggacagacatttcgccagatccattaccttttgctttgcgcgctcgcttgtgtatggcgggctgaagaaatgaacagcttctaccgacaatccccgtttcatcgcataaaaaccggccacagggctgtcaaaaccgccagaaagcatcagcatcgcttttcctgctgaaccaactggcagcccgcctgcacctttttcatcacgaattgtcaaaaatgttgcttcttccctgatttcgattctgagcgggatgtctgggttgcgaacatcgaccgtcaatccttctgtatttcgcaaaatatggccgccgatttcagcgttcatctggtttgtatctaattcaaattgcttatacgctctctttgtcgcgactttaaacgtatcacctggtttatactgatctttgatagcctttagtgcggttgccttaatatcatcaaggcggctgtcacatttaattgccaggctgaagctttgaatcccaaacacttgctttaaatgaggaaaaagagcctcaggatcctctccatttaatgtaatcgtcatacgatccctgttggaaaagtattttaaattcggatagtctttcaaaacgagtctgatgttttgttttaagcgctcaataaagctttttctgtttttgcctttggtcgaaatttccccaaaacgaattaatatatgatcgtaattcatgttctacctcatcattttccttaattttttgataccaggacgaagcgcgttcataaacggttctgccacatcgcttgtctggctgtaatttaaactgattctgatgctgcttccggcaatctgctctcctttgcccatctctaagagaaccttgctgggcttatgttcttttgccgagcaagccgatgttgtggagacgaaaatatcctgttcctcaagcatgtgtaaaagcacttccgctttaatccccggtacagagaaattaataatgtgcggcgcgctattcatttgaggcgtgttgataacgacgccctcaatttcactcagccttttcataaacaattcctttgcggcagtcatcgtgtcaagccgtgtgtcaaaatcagcagaggcaagattaatggccttggcaagcgaaaccgctccagcagtatgttctgttccggcccgtatgcctttttgctgagagcctcccgttatgagcggaataaggcgtgttccctcttttacaataagtgcgcctgtcccctttaggccgtgaaatttatgccccgaaattgaacatagatcaatgccggccttttcaattgccaagggcactttatagatgccctgcacataatcgacgtggaacaaaatgttcgggtgcttcttcagcacttcccctgccgcttcaatcggctgcacggaaccgacttcattgttcacatgcatcatgctgacaagcacggtatcgggacggatggctgcttttagatcttcaatagaaacaaatccgtcttcattcacagaaagataagtgatatcaaacccgaacaactctttcagctgttctaacgattccgtaacagatggatgttcaatagaagtggcaatgatatgtttgcctgtttttatctttgacaaagccgctccttttaaagccgcattattggcttctgtggcgcctgacgtaaatacaatatcatatttttttaggcctaaggaccttttgatttgatttttggctgcttgaagcagctgttccgtttcggctccatatcggtgcaaagatgaaggattgccaaagtatcggctgcttgtctgttcatatacgttcaagacttcatcgtaaggcttcgtcgttgaactattatctaaatatatcatcttttttactcctttatgaaagcggtacaaggtatgatatttatgttaccataacaaaatttaatagaaaattacgaaaaactagtattgacttctaatttttttaccatataataagatttgttcgtttcgtcatattatctgacaattaattgacagaatattttaacataattattaggaggatttttttcatgaaacactcactgcctgtcaaagataccattattattggtttcatgctatttgcgttattctttggagcaggaaatatgatttatccgccggaacttggacaagcagccggacacaacgtctggaaggccatcggcggatttttactgacaggggtaggcctgccgcttctcggcattatcgccatcgcattaaccggtaaggacgctaaaggccttgctgacaaagcgcaccctgttttcggcacaatctttactgtcgtgctttatttatcaatcggaccattattcgccatcccgagaacaggaactgtttcatatgaaattggcgctgttccgtttttgactggcgtaccagaaagactttctttattaatatttacacttatctttttcggcgttacgtactatttagcgttaaacccatccaaggttgtcgatcgagtcggaaaaattctgactcccatcaaattcacgattattttaatcattgttctcaaagccatcttcacgccgatgggcggattgggcgccgtgacagaagcatataaaggaacaccggtttttaaaggatttttagaaggctataaaacaatggacgcacttgcttcaattgtatttggcgttgtcgttgtaaatgctgtaaaaagcaaaggcgttacacagtctaaagctcttgctgcagcctgcattaaagcaggtgtgattgccgctttaggcctgactttcatttatgtatcccttgcttatttaggtgcaacaagcacaaatgccatcggtcctgttggtgaaggagctaaaattttatctgcatcttcccattatttattcggttcattgggcaacatcgtactcggagcagcgattacagtcgcatgtttaacaacaagcatcggccttgtcacatcttgcggccaatatttttcaaaacttattccggcattatcatataaaattgtcgttacgattgtcacgttattcagcttgatcattgcgaattttggactcgcgcaaattatcgcgttttctgttcctattttatcagctatctatccgcttgccattgtcattatcgttctttccttcatcgataagatctttaaagaaagacgcgaagtgtacatcgcatgcttgatcggtacaggacttttcagtattttagacggtatcaaagcagccggtttctcacttggatctttagatgtgtttctaaatgcgaatcttcctctttacagcctcggcatcggctgggtgcttccaggaatcgtcggagcggttatcggctatgtgctgaccttattcatcggaccatccaaacagcttaatgaaataagttaatgtcacagaacgcctgcgttattgcgcaggcgttttgtaataagaaaaagagcctgctcattacactgcgggctctttttcatggtcgtgattatctaagcggatatgtcagctttgattttttcaactgcacctggcgcagccttttctacagcggtagctgcaatttcataagagtcgtcataatcaaaagcataaaaacgtctttccgcttctttcagctgttcagataaaatatgattctggcttctgaaccggtttccgaactgaatgattttttcaatgaggatgacctgctcgacaagttcctctgattcccggcttgccctgttgacgatatcttctgcttgtttcaaatgggctccggcttcttccatatttaatggaagttcgtttagttgattgaccgtttcttgaatatgatgatgcgcgttctccagcatctcttgaatatggctcggaatgcctggaatgttgctagtcttcagcagtcttgctgtctcagaaattgtttttttcaaattgctgagcgtctccctcgcctgaagctcttcttttctcagcgcttgcagattttcacgatactcgtcatgctcttttttcacttcttcaatttgcttctctattgaagcaacttcttccactaaaagtgagtaggcaacatgctctgcatcgagcttatctttaacggatgatagcagcttcccaatttcatcaaggcgcttttcaaaagcctgctgtttgccgagctcaccggctgtcagcctgtagctttccttcaccagctcagtttccgccttcgtatgctctttctcttctttaagcttgtcgtaagcaataatcaattcaggcattttgcttagtacggattgaccggcttcaacttcgccctccagctgctgataaacagattgaatattttcgtcaatgagctgcaggattgcggacgcttcatcaatatccagctcagtcatcaggacatgttccgctcgtttcagctggtttgacagattttctaattccttatcaagctggatatgctcaagcttgtaccctttttctttcatttcgccatagccatccttgagctttgcaatctgtccgggcaccgtctgtttacagtcagctaacagcttcggcacatcatctatgtatgactgaagccgttcaagattgcggtcctgctcaagcagtacttttcttgcagtaatatagtttccgccttctgtttcttcttcaaattgtttgatgccgctccaaatttcgtccagatccttttcaaggctgtcataaagctccccgtaaaggtggctgtaagccagcaggttttttcgagatttcgaatagcgctccctcacctgttcaatctcttcacggctcttttcctcacttgtgacaagatcgctgatttcccgaagaatcttttcaatgcttgattcagccgctgtcagcaggtcgtcgatatgaacgagcacttgattggcctttttaaaccggtatttgtctgcattttcctcggcatcataaaggagctcttcaactttcggcatgtgggctgtgacaatctcatcccattcttcacgccacttctcaaagaactcttctgtctgacccgtcatttttaaatgttttattttagacatttcttccacgatcgaccgatttagaatttcaatcttccacgattccagccggtcgatttcggcgtagacttttttcctgaaaaagtagcctgccgcaaacagcgcaagcagtacaattaataatccaatgacaaactccataatgagcccccttgctgtttaccttaatctgtcagggtgttttatttattcagaaagatttcaggatatgtattgagaaaaactgtcgttttcattgttattatgataccatgtaacaaacattttttgaccagaaatcaaaaactttttgtgcaaaatcggcaggatttgactattttttcatggggtgacatcaatgcaaaagcgagacggacatattcacacaccattttgccctcacggctccaatgacacactcagacaatatgcagaagaagccttaaaaaaagggttcgaatcgattacttttaccgaacacgccccattgccgccctcttttaccgatcccacgccgctgaaagacagcgcgatggcgcaagcttctttggaacgctatattcatgaaatttccggattaaaaaaagaatatcgcggacagcttagtatacggacagggcttgaagtcgattatatcgctgaatttgaagacgaaattacattattcctggacacatacgggccatatttagatgacagcatcttatccgttcattttttgcgcacagactcttcctatctatgccttgattatgacgagcataccttcaaagagctgatttcagcctgcggaagcattgaagcggtatatgaacaatattaccggagtatctattcttccattgtagcatctctcggcgtttataagccaaaaagagtcggtcacatcacactcgtccaaaaattcatcaagctgtttccatacagcatgtcagaacatattcgcggcctcgtttccctgtgcctgaatgccattgaagaaaacggaatggagctcgacttcaatacttccggcttaagaaaaacttacgctggcggtatttatatcgaggattggatgctgaatgaagcgaagcaaaagaagatcccgcttgtgtttgggtcagatgcccatcaagcgggagatgtcggatatgcgtatgaggcgtttttggaacggtgctagttggtgagcgccacgtctcctgtccggaagacgcttctgatccaaatcttgatttcttcaaaatacattttataaaaatacggctcgtgcggctgcatgtagagtacttctgaaatatattgaggctggagatagggcatcatcaagagagattttaattggagaataaaatgaggcagcggcagcgttaaatattcacgctgtttttctccttcctcaatgatcagctggaagatatacttttccttcattagatatgtcgacataatttccctgattaatgtggagtcaattgtgacttcccggtagacaaaacgagttaattgacgatgattatgctgataggataaaatatcgaaaaccaattgaagaagctgttcctgagtgctttgagaagagatattgcttgccgctgtttcaagcgttttgctgtagccctcgtaaaactctgaaactaagtgttccatcaagcctcctttgcctttaaaatagtaggagatgtgcgcaacatttacatcagctgactttgcgatttcacggacagacgtgccagaaaatcctttttggttaaaaagcatgacagcagattcaataattttgtctttggtgcttactttcatacggctcactccttcctcttgatactattcaagcagaaagccgctgttcctgtaagaacttatcgacaaatgccggcagaaaagccggaactttgttttatattatagaaaaagtgagggttttccatgttccatgtcgaaaaacaatctggagataaagaaaaaggctatcagcttctgctaaaacagctcgaagccatgaccgaagacgaaacagatcaaatagctaactatgcaaatgcctcagcactgctgtatcattcgctgcctgaagtcaactgggcgggtttctattttgccaaagaagaggatggacagcttttgttaggtccgttccaaggcctgccggcatgtgttcggattcctttcggcagaggggtttgcggcacagcgtacgcaaacggaaaagtggaacgtgttgaggatgtaaactcgtttccgggacatatcgcctgcgatgcagcgtctcaatcagaaattgtgcttccgattcgtgtagacggaaaaattgtcggcgtcttggacatcgacagcccagtgaaaaaccgtttcgacgaaattgatgaaaaatacttaactcaatttgccgaaacgctagaaaaagcgttagcgcagtaatataaaagcccaaaactgatatcgttttgggctttttttattttattgagtcatgaaccatcaagcggtttttcccgctccgtttcgcgctgtagagcgcttcatctgcctcatgcacaagctctttcagcgacttttttgtttctgtcgtccagcaggagataccgcaggaaatggttacctcgggtttcgtattttttctgaccgcgtaaaccagtcgctcggtaatccgtttccccactgcaaccggcacatttggcaaataaatcgccagctcctctcctccccagcgggcaccgacatcatgctttcggatgttgcttttaatcactgaagcgacttgaattaaaatctcgtccccagtctgatggccgtacgtatcatttacatttttaaaattatcaatatcaacaagaataaaaacacccttttgatggattttcatgctgtattgaattttttcatctaaatacgctcgtgaatacagttcagtcagctgatctgttttcacgagatgctcaaggcggtcgcgaagcattgaattggttacagccagtgtcgcgtgatgaatcagcgcctgaaacagcttgtacatttcaaatgtaaaagcgtacagctcctgtttcaataaaaccgcaaagcctaaaagccggtcgttttgaatcatcggagcagccatcagcgagccgtaccccgccttcccaaaaacagactggccattcccgatgaaaacccctttttcaccttcatacagcttttctttcagctcattataaaaatctgacggcttcgcttctttaaaaaatgctgtgctgcctgggagcaatgttaggttttcaaaatggtctatatgaaaaaatcccacttcttctgcctgaaacgattctgccattctcacagccagatcattcattgtatcagtcaatgtcagccgctgattcaggcgtcgtgatgtttcattaatcaattccaaatttgcgatgcttgctttggattgttcgtagagctgggcattttcaaacgcttttcccgcggcgtttgctaacagcgacatttcatcaaggcaggcatcagtaagaaagctgtcacccgttccttcagccttcaacaccccgtatgtgccctgctgtcctttgatcggaatataggcgacagattcatttttccgcaaaatgtctccggacaaatacactttgagcgcaaaggaatcggatttttccccttccatatatagctcttttgcaggaatccctaaacattggtcttgatcgtgcgatataaataaagaaaactcaaaaagagaaaatgtgcttgtcaagctttctaaaagctgcttcagcacatctgtctgatcaagcagtgaatggaacagctctgtcattttgtatatctttttttggtagatcgttttgttatagagtctttcctgtttcatcgactggtttaaaaatgaagcaaccacgtccggaagcccttcaggaatctcttcatcctgcctgcatgcaagatggaaacgcctgccggagccgtcctcaatcagataacatgaagcgtttatttttgaagcggaaaaacgcgcttcaccatctgccagttttgtcacaaagtctgatggtgacggtgtaagcgaaacacacagggttgaaaaataggtttgaatagccgaagtcagccatatgaaagagtcggtgaatgtgactttttcagatttggttaataaaaaatcgagcatatgataatgaaaggcggataattgatctttagtttgttctaccatgtttttatcacctaaaagtttaccactaatttttgtttattatatcataaacggtaaagcaataatggaggaatggttgacttcaaaacaaataaattatataatgacctttgtgtgaaatattgcagcctttttgttcagcttctatgttttcattttgttccttatcaataaggtgtatcgtgtaactctctgctgctggagcgaggatacatgaaaacaaaatgtgcatggtcgaatagagcagacggtttttattttccacaaaaataaaaccaaaggaggagtcacattatggctcgctatacaggtccatcttggaaactgtcccgccgtctaggaatctctcttagcggtacaggaaaagaattagaaaaacgcccttacgctccaggtccacacggcccaggacaacgtaaaaaattatcagaatacggtttgcaattgcaagaaaagcaaaagcttcgtcacatgtacggtgtaaacgaacgtcaattccgcactttgtttgacaaagctggcaaactagctggtaaacacggtgaaaacttcatgattcttttagattctcgtcttgataacgttgtgtacaagctaggtttagcacgtactcgccgtcaagctcgccaattggttaaccacggtcacattcttgtagacggaagccgcgttgacatcccgtcttacctagtgaaacctggtcaaacaatcggtgttcgcgaaaaatcaagaaacctttctatcatcaaagaatctgttgaagtgaacaacttcgttcctgaataccttactttcgacgctgaaaagcttgaaggtactttcactcgtcttcctgagcgttctgaacttgctccggaaattaacgaagcgcttatcgttgagttctactctcgttaatcgttttaaaaacccctgccgctatgcggtcggggtttttttatcgtctgtttcgtcattcgcctcttgctggccaacactttcttgcgcctgctgctcccaatgatcccgctgcagccgttcttttgcaatcgtacacatgagattcacgctttagcgctcctttcatttaaaaggtggtgattggtcgtgtttgccctatctaatatactcttttcctttcattcctatgcggtaaacaaaaagatcctttgccttcagtggcaaaggatctttttcttatttatacgtcacaaggaagtattttttcttcccgcggcgcagaacagtaaattgatcttcgatgcggtcttcacctgatagggtataatttatttccgtctggcgttcaccgttaatgtaaacagctccgttttgaatgtcttcacgcgcttggcgtttagaaggagataatttagattgcaccaacacatctacaagtgaaagctcttgggtgctgtcaacttccatagaaggaacatctttaaagcctacttttacgtcttgagcagaaagctctttaatattgccgctgaacagcgcttgggagatgttgatggcttgctctagcgcctcgcgtccgtgaacaagtgatgtcacttcttccgccaggcgtttttgcgcttcacgtttttctggcgccgtttctgttttttcagcgtatgcttcaatttcctcttttgaaaggaacgtaaagtatttcaagtatttgacaacgtcacggtcgtctgtgttgatccagaattgatagaattcatatggcgatgttttttctttatcaagccagatcgcgccgccttccgtttttccgaacttcgtgccgtctgcttttgtgacaagcggaatcgttaggccgaacgcttttgctccttcttcttctgattttctgatcagttcaagacccgctgtgatattgccccactgatcgcttccgccgatttgcagtttacagtttttgtctctgtaaagatttaagaaatcataagattgaagaatcatgtagctaaattccgtgtacgagatgccggattcaattcttgagctgaccgtatcttttgccagcatgtaattgatgccgaaatttttaccaacgtcacgaaggaaatcgatcacattcattttgccgatccagtcaaagttgttcgcgatgacagctgggttttctgctgcttcaaaatctagaaatctggacagctggtttttgattttttgggaccattcggatacgatgtcagcagtgtttaatgtacgctctgctttttttccgcttggatcaccgatgaggcccgtcgcgccgcccacaagcgcaatcggatgatgccctgcaagctgaaaacggcgaagtgttaaaataggcagcaggtgtccgatatgcaagctgtctgctgtagggtcaaagcctgagtacaagcggattttttcttcattcagctgtttatttaacccttcttcatctgtcatttgctgaatcaatccgcggaaggataagtcttcaagtaagttagtcataagataaagctcctttttgattaaaataaaaaacgccccttcgtttacacgaagggacgattgattatcgcggtaccaccctactaataagagaatgcaaacattcgtcttatcactttgcctgataacggatcaggtccgttctttcactactgaaagcctggccggctttgtttgcaaaagcggttcatgagtgtattcgatatatccgtctgtgctgattttcaccggccatcagctctctggaacgtaaggatattctacttgtctcaatctttaccttttcatatgaagctatatcatttttaacataaataaaatcctgtgtcaacgccgccttttaatcctccattgttgacagatctccagccggcagattaagctcccatgccttcagcacgcgcctcatgatctttccgcttcgggttttcggaagcttatctttaaattcgatctcacgcggagccgcatgggctgcaagaccctgctttacaaataggcggatctcttctttcagtttatcagacggctcaaatccttccctgagtgcaataaaggctttaatgatttctccacgcaccgggtcaggctttccgattacgcctgcttctgcaatagccggatgttcgacaagcttgctttccacttcaaatgggccgacgcgctcaccggaggtcatgatgacgtcatcaactctgccttggaaccaaaagtatccctcttcatccatgtaagcagaatccccagacacataccagccgcccggcatgaaatacgattcatacttttcagggttattccaaatggtatgcatcatggaaggccagccctttttgatggcgagattgcccattcggtacggcggaagctcgttgccttgattgtcaacgatcgctgcctccactcctggaatcggcttacccattgaacccggtttaatatccatgcaaggatagttgcagataagctgactgcccgtttctgtcatccaccatgtatcatgaattcgtttgttaaaaactttatgtccccatctgatgacttccggatttagcggctcaccgacactgagcacatgccggagtgaagttagatcatatttcgcagccatttcatctcccgctcccatcagcatccgaaaagctgtcggcgcgctgtaccagacattgacgccaagctgttcaatcgtaccataccagctttccgggctgaaacgtccaccgacgatgacatttgtcgctccgttcagccacggtgcaaaaatgccgtataccgtacctgtcacccagcctggatcagccgtgcaccaataaatgtcttcttcctttaaatcaaggacccactttcctgtttgatattgctgaatcatcgcttcatggatatgcagcacgccctttggcgtaccagtggaacctgatgtatagtgaagcagaaagccgtcttttttatccatccattcgatatccagtcttgtgctttcctgtttcgctgcttcatcataattgatgatattcgtgccgctctcagcctctcccccgactacgaagacatgctgcaagtgaggcagtttgtctaccggtattctctccagcagctcaggtgttgtgacaacaacctttgcctcactgttttcaagccgatctttcaccgctccctccataaatgcttcgaacagcggcccggcgatggcgccaattttgattgcgccaagcataataaaataaagctcgggtgatctcggcataaaaataaaaacgcggtcccctttttccacatttccataccgtctcagcacattcccggctctgtttgattcttccttcatttctttaaatgtgtatttttcatcccgttttgcgtctttataataaagcgctactttgttttttcgaaacgattcggcatggcggtcaatcgcttcatacgccgcattcagtttccctgtctcatgccaagagaaatgtttctctgcctcggcccaatcaaaatgccggtacgtttcttcatagttttttaagttatgatccccctctattgctggtaacgctttcaaattcatgcccaaacatccccctttgctgaagttgtcacaattattatagtatatattcatattcttctcaatttttaaaatataaaccaggttgaaaacgctttataatttggtattcttaaagaaggcatgtatttttgataagaattgatgggacggtgaattagtggaacatcataaaacataccattcagcaaacatcaaaacagcaaccggctctttactgatagaagggcctgtctctccagaggatttggcaggttatgagtttcataaagatttaaccgcatttcgcccgcctcgcgagcagcatgaagcgctagtcgacattgcaggccttcccgaagggcgcattattattgccagagacggccgaaccattgtcggctatgtcacgtatttatatcctgacccgctcgaaagatggtctgaaggaaatatggaggatttgattgagctcggagccatcgaagtagcgccggactatcggggatgcgctgtcggaaagacgctcctgaccgtcagcatgatggatgaacaaatggaaaactacattgtgatgacgacagaatattactggcattgggatttaaaagggatgaaaaaagatgtgtgggaatacagaaagatcatggaaaagatgatgaatgcaggcggattggtctggtttgcaacggatgagccggagatcagctcccaccctgcaaactgtctgatggcccgcattggaaaaaacgtcagccaagaatcaattgagcaatttgacaggctccgtttttatcatcgttatatgtattaactgacactgacaaaggggaaaaaataatgattgttgagcaaatcatgaaaagagatgtcattacattaacgaagacagatacgcttgaaacagccatatgcaaactgaaggaattccatatcagacatctgcctgttgtagatgaagaacgacacgtgatcggcatgattacagacagagacatgaaacaggccagcccgagtatttttgaagaaaacaaacgaagcctatttctcacacgaagcgtagattcaattatgaaaaaggatgttgtctgcgcccacccgttagattttgtcgaagaaatatcagccgtgttctacgagcatggcatcggctgccttccagtggtgcaccatcaaaaattaataggcattttaacaaaaaccgatttgctgcggacgtttgtcaaattgacaggcgctgaccagccgggatcgcaaattgagataaaagtaaacgacatcaccaaaagcctcgctgagatcagcagtctttgccaagaccttcaagtgaaaatattaagcgtgcttgtttatccgcatgacgatcccggtgtaaaagtgcttgtcttccgtgtaaaaacgatgaatccgctgccgtttttgcaggcattacaaagaaatggacaccacgtcgtatggccgtcagagcaaagggatctgctatgagagacagtgtatttatctattctccatcctaccaaacctatatgtttcatcaggagcatccctttaatcagcagcgggttctgttaacatatgatttgcttaagacgatcaatgcctttgatgatggagacattgtcacccccagactcgcttcagaagaggagctttcccttgtccacacggacgattacattcaggccgtaaagcttgcgggcgccggaaagcttcccgctgaagaaggagaaagctacgggctcggcactgaagacacacccgtctttgccggcatgcacgaagcggcatcactcttggtcggcggcactttaacggccgcagactgggtcatgtcaggacaagccctgcatgcggcaaaccttggcggagggcttcatcacggctttcgcgggagagcatcaggattctgcatatacaacgacagcgctgtggctattcaatatatccagaaaaaatatagcgccagagtgctttatattgatacggacgcccaccacggggacggtgtgcaatttacattttacgataatcctgacgtatgcacgctgtccattcatgaaacaggaaggtatttattccctggaaccggccagatccaagaaaaaggcagcggaaaaggatatggctattcctttaatattccgattgacgcttttacagaggatgattcttttcttgaggcttaccggacagcagcttcagaagtcgccgcgtatttcgagcccgatgtcattatcagccaaaacggcgccgatgcccattactacgacccgctgacgcatttatcagcaacaatcaatatatacgaagaaatcccccgtcttgcacacactttggctcatcaatattgcggagggaaatggattgcagtcggaggcggcggatatgatatttggcgtgtcgttccccgcgcctgggccagaatatggcttgaaatgaagggaattgacccgggatacgagataccgccggaatggattgctaaatggcaaaaacaatgccccgtggcccttccgtcgagctggagcgatccggctgatttatatcctccgattccccgcaagcctgaaatcacagaaaaaaatgcccaaactgtcagcaaagcattatatgcgatacgctctgaacagcaaagaacaaagtaaaaaacgacctttacgaagaggtcgtttttgattttttgatcactatttccacacgccgattttccttcatgtgttcatttgtcttgttatccttcaccggctttgtatccgcataaccgacagcaataaagcgcttggagggaagcttctcttttgacgtgaagtattgaatcactccacttgcccgtgctgctgatagctcccaattcgacgggtatcggtatgtcgaaatgtttcggctgtctgtatgcccctccacctgaatgtcatttggaatggtttgaagaagaacggcaatttggtgaagaagtgtttcggcatttttcagcacctttgcctcacctgtatcaaacagcacagcctcctgaagaacgagcacgacaccgcgttcatcccgtttggctgtcatttgggccttcaaatgattgtcttttatatatgtatttactttcttgagaagctgatcctgctgatcctcttgcttcttcgtatcagatggggatgtattctttttttctatggatgtttggtccggctgaagcccgttgccttccttctggatcgagtccactgcagctttgaatttttgcagatcgatttgggacatcgaaaagagtaaaataaagaacacaaggatcaaggtgatcagatctgtaaaggttaccatccagctggatgaagattgactgttttttccgcttccattccttctgtcaaaacgttctcttctaagcttcatgtacagatcccttttttgtttttacttgttttggctgcttcttccattcttcccgtgagctgaaaacgaccagctggctttcaaggttgcgcgggttttttccggattgaacaccgataatcccttccaccattacctgcttgatgaaaatttcactttctgttttctcttcaagcttagccgcgatcgggttgaagaccatatttgccagtaatgaaccatataaagtcgtcagaagcgcaatggccatgtttggtccgagcatatgcgggtcgtttaagtttttgagcatcagcacaagcccgacgagtgttccgatcattccccatgccggagcgaattctcccgctttttcaaaaactcgccgcccttttcggtgccgttcctccattgctgcgatttctgaatccatgacgagccgaatcgtttcttcatcccagccgtcaatcgctaaaagcagcccttttttcaagaatggatctttgatttcccgagcctgatcatccaatgataaaagcccgtgttttcgcgcgtgatcggaaagggaaacaaaggttttcacaagatctttcacattgtcttcctggcggatgaatgcctgctttaacacagagggcgcttttttcagctctcttggcggaaaactgataaaaacagcggcgcaaagtccccctgttacgatgaagaaagaggtcagatcaagaaaagagcggaaaccgcttactcccgatcctgaaataatcccgataacaataataatcgttcctaacacaaatccaacaggtgtaagataatcaaaacgtttcatcatttctccccatgaaaaaagcaagaattcaccataaaggtgaagcttgctctttgtttttcttatgacttggttgactttctaagctctatacggtgcggcagttcgacgatatgctcttcaaccggctctttattcatgagcttcgtcagcagtctcatcgcaacggcgccgatatcatatgtcggctgaacaactgttgaaagctgaggacgaaccatgaggcttaatcttgtattatcaaaaccgataatgtcgagatcctccggaatggataagccctgatcctgagcggcatggataatgccgagtgccatttcatcagttgcagaaagaatggctgtcggttttttatccaggctcatcagatgctgcagtgcttcgagtccggaatcatatgtgtaatccccttcagctacaaattgttcattaaacggaaggttcgcttcttcaagcgcacgtttgtagccttggagttttttcgaacggttgatcggttctgccattggtccggaaacgaacgcgatgtctgtatgtcctttatcaaccaaaagcttcacggcatcataaatcgcctgttcgtaatcgatagcgactgacggtgtttcctcctgctcttctacagaagcggcaagtacaatcggcactggagaacgcttaaattccgccacatgctcgtccgtaatgtttccgcccataaacacgatgccgtccacttgtttgccgagcattgtgtttaacaagtgcagctctttctccatgttttggtcagagttgctcaaaataatattgtatttatacattgtcgcgatatcttcaattccgcgcgcaagctctgaatagaaaatgcttgagatatcgggaatgatgacacctacagttgttgtttttttacttgccagtcctcttgccaccgcgtttggacggtaaccgagacgttcaatggcttccaagacttttttcctcgttgtcggttttacattcgggttgccgttcacgacacgggaaacggttgccatgcttacattagcttctctcgctacatcgtagatcgtaatattgctcatcctaaaaccactccttttactggatacacttatccttatctatagcataaacactttatgtagagaaatgtcataatgtccgaatttatgtcgtttatgatttgtaagcgtaagtcagtagtgtacattatttttcattattcatcaaatttaattacttctcatgaaattatacacgtttttatagatgatgaaaacgtatacttggtttttataactaaataaacgagaaagcataaaaaaaggccgcaggcgcggccttttggattgttcaattaagcgttgactttcaccattggcttcagttcattcagccatttttcgaattcaggaatcgccatttgctgagcagagtcagaaagtgcgactgacggatcagggtgaacctcagccattacgccatctgcaccaatcgctaaagcggctttagctgtcggaagcaagaggtcacggcggcctgttgaatgcgtaacatcaacaaagactggcaaatgcgtttcttgtttcaaaatcggcacagctgaaatatccagcgtgtttctcgttgctgtttcatatgttctgattccgcgctcacaaaggataatttggtcattcccttgtgacatgatgtattcagcagcattgatgaattcagagatcgttgcagcaagaccgcgcttcagaagcactggctttttcacggcgccggccgctttcagcaattcgaagttctgcatgttgcgcgctccgatttgaatgacatcaatgtagtccagcgcttcttcgatatgagccggagttacgatttcactgataaccgccagatcaaattcatccgctacacgttttaaaatttgaaggccttcaacaccaagcccttggaaatcgtatgggctcgtacgaggcttaaaggctccaccgcgcaaaattttaatcccttgttttttcgcagctgcagcgacttcagctacctgctcatagctctctactgcacatgggccgacaatgaatctttgctggccgtctccgattttttcgcctttgatatcaacaattgtatcttcaggttttttcttgcgggagacaagcagcgctttgctgtgatcttcttcctgaagctctaaaccggctttgaatatctctttaaaaatgtgctggatggttgaattttcgaacggcccgtcattgttttcaatgatattgtttaacattgtgcgttctctgacagggtcaaatcggttgacgccctgtgcttccttcgctttaccgatctcttttacaacatttccgcgttcgttgattagttttaaaatttgtaggtttaattcgtctgctttctgccttaaaagctctaactctgtgttgctcatttttttcatcctttccctgcacattcattttttattttgtagttatcatgcatcttactataagtaattccaaatggaaatactgaaatacaaaaaattttataaaaactctactttattacccaaacgcttttaagtgataaagtaatctatgaagctatcctacatgatgtgagggcaatgttcaagggttttttacaaaaaaaagcgccagatgatatctggacgcttttttctatgacaaatgctgctcaatagcggcttctgtaatttgtgaatgtgaggtatgccatttcacttcaccgttctggatgatgaatacctgagggctttcatgcttgaccccatatgtttctgcaatgaaattggacagcggccgggcttcttgtacttgaagatagtaagccggcacatcctcatgctgatttgcaaaggcatcaaactcatgaaatgctgcctggctgatcgggcatgtggtgctgtgtttaaagaagacgaaaacgccttcctgttctgcaatccgtttaaattcttcctcagattgaataagctgtttagccatgactcaagctcttccttccctgctcagcgattcaactgctcagcctgtttttgtgcatctttcagttcgtcttttacatcttctttcgtctggaggacttgatcttttgtttcatcagccgcctgcatcgcttcttccctcatatcctgcattgcagtcgatgaatccgttttgtcagatttggaacggtctctcaaatcctttaccttgttcatgatctgtccagactgatcggctacaagctgtgtgatgttggaagttttgtcttttgcgatgctgacatattgcgtgcctttttccttcgcatctgccgtcattttatcagttttgtcccgtaaggcaacagcctggctgccgagatcgtcgcgaagttctttgcctgatttaggtgctagaaaaagagctgtagtggcaccgatgattcccccgattaaagttccgattaaaaaatctttactattaattccatctttgctcatcattattcctcctcttagtatttttttctcttacagggctgattttttcttttgcttccatttctcccaaatttccattgctgcttgactccaagtgacaacttgattgatcttatcttgattttctctaactgatgccgatacagaccctgccgcttgtttcatggatgtattgaactgctgtacagaagctcccactccttgaacagcatgaacgaccgtgttcagcttttctgatttttcctgaatatcttcagccaggcggttggtcttatgtaaaagctcggctgtttcagttgtgatgcccttcatttgtccctccagcccttcaagagtggatgcgacgttttttagtgtcagctgcaatgacttcagtgttttagacaagtagatcactaatacgagaaatgcaactgcgatgagtgcaacgctcaaataaagaataataatcatctcaaacctccttgctgcaggatatactgctgtttacccgttttcttcaatcataaacatgtgtactgggctgtatacatactattctccgttatgtaagaaaatcctttaataagcttttccatcagataaataaaaagcagtgagatcactgctttttattatgccatgacgttttcgtaggctctcatatatttttggatatctcctgctcccatgaagatgagaacggctttatcatgagcttttaaaacagatgtgtcatcttcttcaatcagcttggcattatgaatttttccctggagatcgccgatcgtcagctttccggcattctcacgggctgagccgaaaatatcgcataaatacacacagtcggcgccgctcaggctttctgcaaattcgtcaaggaactgctgcgtccgtgtaaatgtatgaggctggaataccgcgacaatttcccgatcaggatacttctgtcttgccgcctcgattgtcacttttatttctgtcggatgatgggcatagtcatcaatcagcacttgatccccaagctgcttctcattgaatctgcgtttgacgcccccaaaggatttgagagcatgcttaatgatgctggaatcaatttcttcataatggcataacgcaatgaccgccaatgagtttaatacattgtggtggccgtacgcaggaatataaaacgtatcatagaacgtattgcggacaaagacatcaaaagttgtcccttccgtgctttttacgatgtttctcgcttgaaaatcattttcttcccccgtgccataatacacaaccgggacgttcgcatggattttcggcagatgctcgtcgtctccgcaggcaataatgcctttgttgacttgaagagccatctcttggaaagcgtcaaatacatcgtcaatgcttgagaagtaatcagggtgatcaaaatcaatattcgtcataatcgcgtaatctggctgatagcttaagaaatggcggcggtattcgcacgcttcaaacacaaagtattcgctgttttcatttccctggcctgttccgtctccgattaagaaagacgtcggttttgcgttttggatcacgtgagccagcagacccgtagtcgacgttttgccgtgtgcgcccgtaacggcaacactcgtgaattttttcatgtagtcgcctaaaaacttatgataacgtatcaccggaattccctcagacatcgctttttctatttcaggatgcgtgtctgggaatgcgtttccggcgatgactgtcatgccgggtttaatattctccgcgctaaaaggaagaaccgtaatatttcttttttcaagcgctgtttgcgtaaaaataaatttttcgatatccgatccttggacagtatatccattatcatgaagtatttgggcaagcggactcataccggtcccttttattccaacaaaatgataaacagtcataattgtacctccaacaaacgtctatctgttccccagtatatgacgctcatttcaatttgcgaccgcggcggctgaaaagcctcccttagcggcgtattttatatgttttgttatgtttagtatcaggttatttctttccgattaaacccagatatcaagatttgtctatgcacagctgctgtaaagcggcatagctgttaaatgctctaaacactatcataccatgtttggtgtgaaaatgaacccatattattcgtttattaaatcacttgctgtgatcagcacctcccgaggcttgcttccttttgcctcagagatcatgccttccgcttccatcatgtcgatcagccttgccgcacgattgtaaccgattctgaatcttctttgcaggcttgaagtgctcgcactgttttgctctacaacaaactcacacgcttcgtaaaacagttcgtcctcttctttcagggcagatccttgtcttacgagctcttcttgttcaaataaataggtcggcggcatttggcttctgacgtgggaaacgacgcggtcgatttcccggtctgacacaaagttaccttgcagacgaaccggttttcccgatccgttttccaaaaagagcatatccccttttccgagaagcttttctgcaccggctatgtcgataattgttcgggaatcaacctggcttgaaacagaaaaggcgattctcgttgggatattcgccttaatcagacctgtaatgacatcgactgacggacgctgagttgcgacgagaagatggataccgcacgctctggctttttgggcgatccgcgcaatgctttcttccacatcgtttggagccaccatcatcaaatctgcaagctcatcaataatgacaactaaatatggcagcttttcacccatttggtgttcagcggttaattgattaaagcggtcaatatcgcggacacctgaatgggcaaaaagctcatagcggcgctccatttcctcaacgacccatttcaaagcagctgtagccgctttggcgtcagtaatgaccgggctgacgaggtgaggaattttattgtaaggggccagctctaccattttcggatcaatcagcagcacctttacctcactcgggtcagctttataaagcaggctgactaatattgtattgatgcatacgctttttccggagcctgtagcaccggcaatcaagccatgcggcattttcttcaagtcgataacaacaggatttcctgaaatatctaatcccagcgcagctgtgagcggtgacttgcttgtcctgaaagctgagctgcgaatcatttggcgcaaatcaaccaccttgctcgtgcggttcggcacttcaattccgatcgtgtttttccccggaatcggcgcttcaatccgaatatctctcgctgagagactgagtttaatatcatcggacaagttggtgattttattcacctttacacctggttcaggatgcacttcaaatctcgtgacagacggaccctgggttacatggaccacattggcgcggacattgaagtttttcaaggttaaatcaagaagctgacgctgttcttcgatccacgcagtatcatcttgaacctgcgctggcgggacatcaagcagtgcaacattcggaaatacatagctgccgcggcgctcctctgctttttgctgtttatgcgtatctcttttcagcatcatcacattaaaaggaacggatggccctttttgagaagatgcgctttgttcagtccttttctcctgtacaccaggcctttttttcggctcttctgaagcttcgcgaggtttgtctgcgcgaattccctgccggttttcaagagttgcagtaaacgatttggaaccctgctccatgtgttcagttttctcaagctctgtatggctgtctggctgaacatctatcttcgtttcctgagcctctcccaggatgtcataatgattatttattatgctgtctgatggctcttctgattcttttgccacagtttctgcttgagccagagcctctgatgaatactcatgatcagtaaataaaggctcttcctgacgaatgtccatttgttcttcttgaacgaacggggactcagcaccttcttccgcgttttcatgatgattgtatactgggctgtctgacggctcttttgctttttcatcctcagatattgcctctgtctgagattcaggagctgtttgctcttcatcaagttcagcggagaaaacaggctcttcaaatttctctggctgctgctccctttgttcttcctcagccgttgcaggctcttcgcggcctacttcactgtctgaaagcccttcagccgccgtatctgtgagcatctcaggcggtgtttgctcttcggcatgttcagctgggaaggaaggctcctcttcttccggctgttgaacgcctgactcaaatggcactttgttacctgacggctcggctggccttttcgccagcgcctcatcattctccgtatcctttctgtttaaaacgccagaaggctgtttttcaaattgggtatccgggaagaaaggactttcttttttggaatgcgcctgtgtgtctgaagcaggatagccgcgttcacgttcgatctcttctgacagcagtgttaccttctcttttaccgatttatccggttcgttcaatgtttcagaaggctttttcggcacatcctttttaacagatggtttttgattgaatccatagacaggcgaagggatatttgtcggtttaaacggtttcttcgccggctctgctgcttgatatgtatgctgctcttcttcatttctgggacgctctctgtaaggtgcagcacttggacgaggcgcggatttcggttcgtccgatggtgtgcggcgccttctcaggtcatgatttttgtatccgtcaggcacgactggaaaacggaatttgccttttggatattcataatatattttaggatcttccaatctttttaattgtccttcaggatgatgtacttcttgttgctgcggaatttgagcgggttttgtctcccgttcagcatcctcttcgctttcgcctaaaaacaaatcaaaaaatttatgaagccaactcataatttatctctaactcccttatagttttctgggacggtttttagtataccactgctggtcggcccagaaaagattaagctatcagcagaaacaaagccgctaaacaagggcttagcggcttttcacatgattcgttttttttggcggatttatgggagtctaaaaccgaaatgcgtctcctgcctcatagtctccttctaacacaaggattcctttttcagcaggggcatccggcaaatcaagctctttcgctgagcagatcatcccgcttgacggaacgccgcgaagctctgcatccttaatgacaagtccgctaggcatcacagcaccgactttggcaacgacaactttttggccttggtcaacgttaggcgcgccgcagacgatctgaagcgtttcttctcctacgttgactttacatacgcttaatttatccgcattcggatgtttttcttttgattctacataccccacaacaaacttcggagataaatcaacgactaatgtttcttcaacgccgtttctgtttaaaatctcattcacatcttgcacgaatgtttctgagagcgcaacagggccgttttcatcaatagtcaagtaagaagacgcgttgaaaatgttgaagcccgttgtttcttttgtttcgttattgaaaattttgacgacgtcgccgtgtttttcatagcctaattgttcgcgtgtcacatcttgaagagagatcaggagcgtgtctcccacaccttctttattataaaaagcgttcataagtaaaaatcctttctaatcctttttcggacggcttttcgccaggataaacaccggttccagctttccttcattgtacaaaaatgaaagggcggtaatcgggacggtgccgcctgcaaagaagctcatcgacatttgtcctagaatatcataccccgattcattccggatgtcagcaagaatcaaaacgtcctgatgaggaacagagatcgccagctccccttctgcatgctgcttatactcatttaagatcgcttcgttcaaaatccggcttgcgtcgtatccgtcgtttgccctgaagaaataaaagtaattgccggcaaccgtatcttctttgacaaccgtcggcagggaacggagattaaatgcggccgtctctctgatccgctcttttgtccagttttctttctcaagcatgcgctggtcaattaaacggtaggttttcccgagatcaagcgcgtaataaattcttgtctctgcggtatgatcgtcataaatgagcgggatatcttcactggacttgtccgggaaggaagtcgagcggatgaccggataaatgcgagtttctttcccggtcatttcctgagccttcccttccattgccgtcatcgcttcagagacatagtacacgatctcatcaatggcttcgtcttttttcagttcccattttgcaataatcggcggcaaatcgagtgtaatcccttttttagtcgtttgatcctcaacacggagggtgtctttttctctgtcaaacagaaaggagcgattctcgtgctgaaggcgctgtttcagtatatctgacagcttccttgaggtcattttcaaaccgatgtcctcctttacgctttagcgagagagtctgttaaaaactgttcaatttcttcttttgttttgcggtctttgctcacaaaacgatttacttcttttccttcattaaacaccacaaagcttgggattccgtaaatttcccactctgcacatgtatcaatgaatttgtcacggtctacgtagtagtaggtgaattcagggaaattcgcttccaattcaggcaggaaaggctctacaaaacggcaatccgggcaccaatcggctgaaaacataaatacagaccaatcatcctttaccgctttttccagctcttgagttgattcaatttttttcatttcatatccctccagttgtttatgttcttacatgttttttatcgatactcgtccatttggatcataccaaactgcttgaggcaaaaccacttatatgcaacgaatgaatatgtaagattggctttcccattatcattatcatattttatttgcattatcaagctcgtttcgtttaacatcgtgtacatgagggtaaaatttacagatggacatacataaggagggatttttatatggagtttatcgtctatttagcaggagaaatccacagcaattggcgcgaggaaattaaagaaaaaacaaaatcactgaagctccctattacgtttgttggcccgatggagaatcatgaccgctcagacaatattggtgaagaaattatgggcgtacagccaaatgccgttttaaaggatgacaaagcctctgacatcaacaacttcagaaccgccgtcctgatgaataaagcagactttgtgatcgccctgtttggcgaaaagtacaaacagtggaacacggcaatggatgcatcatatgcgatcgcaaaaggaaaacccctgattatcatccggccagaatcgctccaccatcctttaaaagagctttccaataaagcgaatattacggttgaaaccgttaaccaagctattaaggccctttcctatctatttgaaacagaataagaaaaaagcttgtcgatccgggcttactgctcgttcaacaagcttttatgaaacctacatattttctttaatcgcatccaccgtctgcttatcgcaggctgttacaagtttgatgagcatttctttagcagcagcataatcatcaatatgaatgatagaagcgtttgtatgaatatagcgggaacatattccgataaccgctgacggcacaccgctgttcgaaatatgaaccttgcctgcgtctgttcccccgccggatacaaaatattgatatggaatatcatgcgtttcagccatatcaagaacgaattccctcattccgcgatgcatgactgtcgttctgtcaagaatgcgcagcaaaaagccttttccaagctggccgaattcatttttgtctccgctcatatcgtttgccgggctggcgtcaagggcgaaaaacaagtccggtttaatcatatgagaagccgtctgcgcgccccttagccctacttcttcctgaaccgttgcacccgcatagagtgtattcggaagctctttaccgtgtaattccttcagaagttcaatgcttaagccgcatccatatctgttatcccatgcttttgataaaattttcttttcattcgccatcgtcgtaaacggacaaacaggcacgatctgctgtcccggtttaatgccgattttgatggcgtcttccttatcatccgctccaatgtcgatcatcatgttcttgatatccatcggacggtttcgctgcgcatctgtcaataaatgcggcggtatgcttgaaatcacacccggaaccggcccgttatctgtttgaatttcaacccgctgcgcaagcaaaacctggctccaccagcctccgagcgtctggaatctgagcagcccgttgtctgtaatggatgtcaccatgaagccgacttcgtccatgtgcccggctaccataattctcggtgcgtcctctgcgcctcgtctgactccgaaaacacttcccagtctgtcctgaacgatgtcatcggcatatttggctagctcctgcttcataaaagcacgaacctgatgctcattgcccggcgcgccgggaagctgcgtcagtgtttggaaaagcgctttcgtttcttgattcatgttttcccctcatttctatgtagtccttttattttattagaaacaatgaagttttccaagcaccctgacccaatctgctcgatcagccgcgtattgcttaacaggatttggctgtttctgtataatgaaaagtacgatcaaccaggaggtgctttattttgaaattgcgtcatcttcttttaggagcaggacttggaatttgtacggctgtcgttgtgaaacaatatgtgatgaagccttatatttcttcagaaaaagcgcttcgaattgtaaagtctgcttttaagcagcggggcccgattgacggatcatggatttacacccagccggagccttacaatattaacggagaaacggtacaggtatacaaaaccggcattacacgatcagctttcggagaattagaacagtatgaagtcatggtggatgcgaaaacgggagaaattgttgatgtcattgatacaatcgcctcttaacaccggacaagcaaaaaatagaagccgctgcctacgcagcggctcttttttattatatcgcgcgaatcggtttgtataccggataccacatcgcatcctgcactgcctgtataatgtcttcaggctcttccgtagcgacgccttccttcattgcggtttttgcaacttcaacagcaacggttgccgaaacagtgcgcaaatcttcaacttttggaagcatcggcgcgccaggcaccccgacattgaccatacctgcgattgcccgggcacatgcttcaaacatgccgtcggtaattaattttgatttggtaacaatcgttccaagaccgagaccagggaagacaagcgcgttgtttgcctgcccgatatgatacgtaactccgttatattcaactggcgggaacgggcttcctgtcgtgatcagcgcacggccttctgtccattcgattaaatcctccggttttgcttcagaaagagttgtcggatttgacattggcaaaatcgccggccgtttcacatgtgacgccatttcttttacaatttcttcagtgaaagcgccggaaaccgtagatgtgccgatcaggatcgtgggtttcgcctgccggaccacttcaagaagatcaatgcctccgccgtctccgttccgctgataatccttcacttcttcagccgaacgagcatacggcttttggaaatcaagaagctgatccatatcatctgttaacagcccgtttctgtctatgcaccagaagcgcttgtatgattcttcttcactcagtccctcgcgcaccaatgcttcccgcagctgttcggcaattccgattcctgccgttcccgctccgaatataacaactctgtgatccctcagcggaactttagacgcttttgcacaggataagactgcggccaaagaaacagcgccagttccttggatatcatcattgaaggtacacactttatctttatagcgtttcaaaatgcttcgcgcgtttttcgccccgaaatcctcccaatgcagcaatgcattcggaaatgtttctctcgccagcgcaacgtagtcgtcaataaattggtcatagcgttcgccgcgcactctggaatgctggttgccgacataaagcgggtcgttcaagaggctctcctgatttgtccccgcatctaaaacaactgccagcactctgctcggatcaatgcccgcagccgctgtataaaccgccagcttgccaatagaaatcgcgattcctccgacgccccagtcaccgattcctaaaattccttccgcatcagtggcaacaattaaatcgatcgtatcgctttgatctttatactgtttaaatgcttctttcataccgtccgggtcatcgattgacagatagagccctcgtggttttctgtattcatggctgtatctctggattgccgttccaactgtcggtgtatagacaatcgggagcatttcccctaaatggtcatttaacaggcggtaaaacagcgtttcattccgatcgtgcagcgccgttaaatagacatttttgctcaaatcgtcaggctgtgcggaatattgttcatacgctcttttcgcctgatcatcaattgttaataccttgggcggcagaaagccttttaaaccaagttcttttctttcttcctcagtaaaagcaacacctttgttcaaaaaaggaacagagagcacttcaaggcctcttaatgttgtttgaatgtctccttcgtttgttactctgaattgtttcaccctgcctcttcctttctgagcataattagtactaggtttgcattattagccggaaaacatgcagggtaaacataaaaatatgctatcgcttcattcgcttaactgactttttgatacttccgtcctcctcccattgaagggcgcgatactcggcatcatggtaaaaaataaaccaagcatctttttctgctgcgaacgcctgccatttctgcttttgcgggatagaggtcatcggataatcatcgtaagccagcacccatagcggattgcggtgggcatgtgtcggcatcagatctgccatatgtacggcagtttcacccgcatcctcgcatatcaggacactgtgtccgtcgctatggcctccggtgtgatgcattgtaataccctctgtgatcgttaaggtgtcttcaaaggttttgacttggccagctacagcctcccaattttctttccaatacgtatttttcgacctgatattcggatggcgcatttcgtcccattcaacagctgatgtataaatcactgcattcggaaagacagagacgagccgttcaccttcatattccgttaaaccgcatgcatgatcaaaatgaaggtgtgtcattgcgatcacatctatatcggcaaccgttaatccgagtgcagctaatgagggtttcacattcgactcttgtgtcacgccatagtttcgtttttgtttatcagtcagcttgccgtacccaattccggcgtcaacgatgatattgagcccatccttttgaatcaaaatagggtctgtccttagttcaatctggtttttttcattgactggatattttttagaccaaagcggctttggaacgacgccgaacatggcacctccgtccatatgcgtcacgcccccgtcaagccaggtcaacgtgatattaccaattttcattgtttccattttcatcccccctgtcatcatggtagcaaacggcccataaaaaaaacagactcctgtcagagtctgtctttacgttctccattcaacctcagcccgatagatcggctggccgagtgcagagaatttttcttcatattctgtcataatattgccttccagattgctgttatgcaaatcgaggctgacgtatgtcagcagcaggccgtactcagagaagctcttcaaagagtactcaaataaacctcggttgtccgttttaaaatgaatcgatccgcctttgcccattacttcttcatattttttgaggaagtgggaatatgtcaagcggcgtttttcatgccgtttcttcggccaaggatcagaaaagttcaagtagacccgtttcacttcccccggctcaaacacatccgtcagcgtgtccgcatctatattcagaagctttacattctgcgcttcgctgtcttttactttttggacggctgtcacgatgacgcttttaaataactcaataccaatataattgatgtcgggattttgtttggccataccagaaataaattggccttttcctgtaccaacctcgatatggatcggattgtcgttgccaaacactgtgttccatttccctttataatcagcaggattgctgatggcaatatctgcgttttcagccaaaaagtcatcagcccaaggcttgtggcgcattctcatatgattgacacctctatctattatttcgactaacaacataccatgaattaaaaagacccgcaagctcgtttttccagtgtatctctcttaaggccgagcgcataaaaaaagagggtcccgtctgctggaacactcctttcacatgtataaaaacgctctgttttgaacaatttaacccgtatgatactgaagggatgtgtaccgttatgggtttacattatgagcatcaagttcatttattgaaggatatcttgactgaccatcaattggactgctgcggaacagtcgcagagtacgagcagcttgagcgtgtgattaaatcactgatggcaaacaccgagcttgattcaaatttcaaaaacgtgcttgaagatgtttaccgctacagccaatcaggaatatcgtccaaatccattgactcacacatacaagagcatcagaacagcctgtctcaatgggtagagcaaatggattcgtattcctgattaatcaacaattcgtttcatgaggatatgcagctcttccattgcatcatgaaattccttatcattgccttttgctttatgccaggcaatgaaagtaattgtttcagataacacataccaagccattcgcaaccgaaggctttctgtcagctctatgccgtacatgctcagccagctctcccaagctggcttttcgacgtagtggtacagcaaaggcccgaggtccatcgccggatcagcgatcatggcgccgtcccagtcaattaaatacagctggttgtcttcagacaatagccagttattatgattgacatcacaatggcaaacgactttctcaccgaaatgcacttcatgcaggtgttcttccaaatacttgatcccttcttgaatcagcggcgaagattgctgcacagcaaatacagcctgcttcagctgagacaaaagagcccccgggttcagcggttcttttccaagtctcttcagcatgtccagcaaggcttttgatgtgtgtattttacgaagcaattcagcaacgggccgtccgctcatgtctttaggcttcagctctctgccggtcatccagtgctgggccgtaatgacgtccccattttccatccgttttgtccaaaccagcttcggaacaatgccttcggcggataaaacagctaaaaaaggtgagctattacgttttaaaaaaagctgctgcccgttatgtttcgcataatatgcatctcctgtagctcctccggcggggaagatctcccaatcgctacctagtaattgtcccaaccagttcatatcaatgttcaacccatcatttcttaaaatattttagaattaaggctaatcgtttctagtctatccagcgaatgcctttttcgtacgaatcgtataaaaataaaaaagacagctattgagagtctcatatgctaatcaatagccgtcctttaaattttagcgctatagcacaaacttcgtcaagcaaaactcttaagatctgatgctaaatataagataaccgttccgatgccgtttactgcaaccgttttcttgatttctgccgggtcttcctgaaatcctgatggatcacataaaagccgataaggtatgtcgtttggcagcctccactcgacggagtctggactcgcgtgatggataacaatgatatctttccattcgtcaacctcgtcaagatcataaagcctgtatgcgataaggtgttcttttagcgtcaagcattcaagatggcgccggatgtctgcagcggacctaagacggaatgcaggatgcgcttttctcagcgagatcagcctgcggatatagtgaacatcttctttgaatgtttcgcggcgatcccagtcgagctggttgatgctgtcactggattgatagctgttttccactccctgcttcgtccggaaaaattcctgaccgctgtgaataaacggcaccccttgggcaagcaaaataatcgcggctgcaagcctttgcctgcttcgctttcggctgtcattttcttgaggaagcgcgaagctcattttatcccaaaaggtgtgattgtcgtgtgattcgacataattgatggactggcttggttccggaacaatcggtgctaatgccttccatccggaagacccggcaattccatgcatcacagcttgtgctgattcactgctgccgagcgcaaaccctgctgccttaaggtgaaaggtgttcccttttacagcgtcacgaaacatatcattaaaaaagccgatgcccggcattcttggcgcgttcgccaaagcagctttctgttcatgcggcagcggtgtagccagatcccacccttctccaaaaagcaggattccgggctttgccttagttgctttctctttcatataaagcacggtgtcaatatctaaaatcccgaggagatcaaagcggaagccgtcaacgttgtattcttcaagccaatagaccacgcaatccgcaatgaactttcttgccatccttctttctgatgcgatatcattgccaacgccggtgccgtttgatggcatcccacattcgtcgtgccggaaaaaataacctggcactgtcttttcaaagggggaattctccctcttatacacatggttaaaaacaacatccagaatgactcgcagaccgtgctgatgcagggtattgatcatttgtttcagctctgtttttctcgtttgaggatcatgagggtttgaggcatagcttccctccggggcaaagaaatgaagcgggttatatccccaattgtatgcatcaagcggcttctcttcatcaactccggcaaaatcgttcaccggctgcaactctacatgagtaacaccgagctcttttatatacgccagtcccgaagaactgccgtttgcggtttgtgtatccgtttccgtcagcgctaagtattttcccttgtttatcatgccgctgttttcatggatggagaagtcgcgaaggtgcgtctcatagatgacggcatccacagggtgtgagaatggtttaagaggagcagtccatttcatttgatccgggcgcaagacgacgcccttctctccatttacagtcacagccttggcatacgggtcaactgtttccatccattctaaattgttgcagatgcaaaacaaatactcatacccgtgaaggtcacccgtgaccgtaacagcatagacacccttttccaagcgattcatttggaatgtgcgcccgcttttattggggtgtgaaagcttgacagcagctgaggttgcagcaggcgcccatactttaaatacggtatgatccgcggtataaacggcgcccagctctccgtcataataaaattcgtcatcaaacgcagccgtccggatgaccgcgccaatttggagatccgttttgtggccgctggatgctctgacgcaatggatttttccaaatgtcacaggatggtcggatacgcagacgtacttgtattttgcttcaagggagtattcctccctgacagccagaggaaaaactgttgtttctgtctcaagccgaaacggcggtgtcatgatttccttttgttcagcaggaatcagaacagtaatgatattcatatcatcgacatacgcttcgaagctgcggcggatgctgaccatcggaagctctctcctccaaacacgtttatgttttgatccttaggggtgaaggactagatgccagacgaaacggggtagtgcccatgatttctccgtcagcatggaacgggattttgtccttcgtgtaaaatgtaatgtccttcgctttaaacatcgtaacgccatccatctttgtatgttttccaaatgccatgagacataaaagccaatattttttcaaaaacggctggttttcaacgattacgatatcaaatgtcttctcgcgcggatttgctaggggcgccgccttcatgcctcccccgtaaaacggatggttggatacaacggcaaaccagacatcatgaaattcgcgcgtctcgtcttccgtcgtacaagctaacgtaaacggcttaaaggttgccgaagcgtgcaaatgagaaagcggatacacaagaaatcgaaggcggagaaaaagaaaaacccgtctcaacggaaattccatcgcctttttattgacatatgcgtcaaacccgatcccgatgtgattcataaaataaagaatctgtgatttatcctgaaggaaattgacgctccctaaatgaaaggttcttgttaacgggcgctttaccttcttgatttcctgtatcagatcgatttttttaatagagaaccctcgcgaaaaatcattatacgcgcccgccggcacaaagctcagctcaatatcgtcaacatctttcagcccgttgacaacttcatgcatggttccgtctccgccaatgacgatcaggcgcttcagcttatattcctgtatcgttgaaatctgtctggcgagcacctcggcgtgtcccggatgttcagttaaaaatgaacggtgctcaacctttcgtttgatcaattctttttgaatggacttccaaacacgcaggccgtttcgatgtcctgctgtcggattaataataaaaaaccaatggctcatctttctcacctgcttatgttatgagaaaaccgctcaaatcgttctcttttactccagccactcctgtctgcgataggagtcagacatgcagtaagacaatagagcctttgcagcctttacctgatgatgtttgatcggagcagtgtttttcttctgccgctcaatccattcttccgcgctccgcttatccgctatttctaagccgtatggcggctccgggtaatcgatgtacgacgttctgctcagaagcaattttcgaaccggaatctcagcctgtttttcctttacgatctttgacacaaccgagtccgtacgaaacaggctaagccctggatttaacactgatgcagtctgagaggctgttttcttgtcccaaaaacgatttttagaccctatgtagacactgtcttcctcagcctctaaaaaagaaacgcaataaatttccagaggagaaataatcacaatgcttaattcaaccgccgcctgctgaattttcagcacaggcttatacataataaaataagaatcaggcagctgctgggtcagataacgcaaaatgcggtcctgcttcacttggtttgagagttgagatatttctgaaagagtagagcttgcccatttgagctgaaaatcatataaatgccttttataaaaagaagcaagcgccaccctgctcttcgggagccttacatgaatatcttcttcgtcctcaaaccattggtgtctctcttcttgtatatcggcttttatctcttcttttcttcttttcaatgaaaatttttttcgtttctgcaccggttccggttcttcagcactggcttgcctttcttcatgctggcgctccgctgcttctactagtgaaagccagcgctcttttttcaaacgtacaaactggttgatataatggtacggatcaagctcatatctcgatatataatcatgaattttgatgatttgtgccatgtttgtttctccactccgcaatgaattaagataattgaaatttgaatatttcctcgtattttggtgattggttcaagtgtatttgaaagagcgaaaatcgttcagccatcatcgaaacctcgccgctttcaaacggaacatgagctggaaatccattttcgcctgtccattttcttgccagcgtcatatgaggatgatacggtcttttttccacttgaaagccggcctgaaggacagcctgcttcgtatgttcccgcagtctatcaagcgttttgtttttctttggctccagatgtaaaacgcgcggccttctgcggtcgccgaatacatctatcttgtcaaactcaattgaaaatgggtcaatttctgaagcaatctctgctagcgaaccttcaagcttctttatttgtgtctcatccgccgctccgagaaaaattaacgtgatatgatagtcaagcgggtgcacccatttttgaaacgtcaataccggttcgtttttcgcagcctggtagatcggatttgcaattccctcaggtatgggaacgccgatgaaataatgaggccgtatatctggcatccgtctgacactcccttctttgacagctattattttatcaataaagaggctgtgcggatagaggaacagtgtatgaaaacactctcgcacaaacgtttattatgttaggatattatatgacacttgttttattcagaaaggaatgacaatgttgaaaatcgttgcaaacacagctgatctgataggagatacaccgctagtgagattgaatcggcttcagccggaaaatgcggcacaagtctatttaaagcttgaatttttcaatccgagcggcagtgtgaaagacagagccgcttatcaaatgatcatagaagctgaacaaaacggtttactcaagccgggatcagttattatagagccgacaagcggaaataccggcatcgggctcgccatgaatgcggcagcacgcggatataaagcaatcttagtgatgcctgatacgatgacgaaggaacggatcaacctgcttaaagcttacggcgcagaggttgtattaactcccggagaggaaagaatgccgggcagcatcaaaaaagcgaaggagcttgccgaacaaattccgaacagctatattccaatgcagttcgataacactgccaatcctgatgcgcaccggaaaacaacagcgcctgaaatcgcccgggcaatagaggaaatcggaaaaccgctcggcgcttttgtcgcctcctctggaacgggcggaaccattaccggaacaggtgaggcgctcaaagagctttttccggatatcacggttcatgttgttgagccagcgggttcgcctgtattatccggcggaaaacctggcgcgcataaacttgtaggaacgagcccaggctttataccgccgattttaaatgaggacgtttatgatgaaattatcaaaatctctgatgaagacgcgtatacgacgacaagacggcttgctgctgaagaaggaattcttgtcggtccttcatcaggcgctgcctgcttcgcggcaatcgaaacagcgaaacgcctctctcctgacaaagttgtggtctgcatgacagctgatacaggagaacggtacttatcaactgatttatggtcatttatttaaaaaaaggactggcttcagcagaagccggtccttttattttgcaagctcgtaaatggcctgagcatataacgctgtcgatctcagcaggtcatcaatttcgatatattcatccttttggtgtgcgctgtcagggcgtccggggaacagcgggccgaacgcgacaccggcttttaaggatctcgcatatgtccccccgccgattgagattaagtcagcttttttacccagctggccttcataaaccttttgcagggttttgactaacggatgatctgcggacacgtgatgcggcttgctgtctttgaattctcccagatcaaattcagatgcactttcgaatgcatcgcgaatcgctttgctttctgctgtcacaggatagcggatattgatcccgagctcgcctccttgcccttctttatagcgcagtgtgccgacatttaatgtcagctcaccgctgatttcatcctcacagtcgatgtccagtttttttcctcttgtatcacctgagaacttatctgtcacaacttgcacaaaccgctttcctgcatcgtcaagctcagtctgctggagaaattcgcacaataaaatgccggcattgatcccattgttcggttccatcgcatggcaggaaagaccgtacatacgcaaaatgagctgaccgttctctattgcagcttcccctttttggtccgtcgtgcggagcatgtctttaaatgaagacagaatctcttcttttttcggcccttcaatgacagcttccgcagcgtcgggcaccatgtttaagcgaaggcctgattgaaacgagacaagcactgcctttggttctgcttgatttgggcggtgcggtataagtaaagaagcatcgatgatccctttttccgcattaatgattggaaaatcggcgtcaggcgcaaagcccattgttggcatttcttcatgcttgaaataatgctctacgcatctccaatcactttcttcatctgttccgataatcattctgactcgcttggacaggggcaaattcatgtctttcacgattttcagcgcgtagaatgccgccattgtcgggcctttgtcatcaatggcgccccttgcataaatccgtccgttgcggatttcagctgaaaatggatcactcgtccatccatctcccggcggcacgacgtcaacatggcaaagtacgccgataatgtcatcgccctccccccattcaatatgacctgcgaagccgtcaagattttttgttgtaaagccttctttttctccaagctccagcaatgaagtcaggctggcatttaccccttctccaaacggtttaccgggtccggcggttgtttcgtccatgacactgttgattctcaaaaattcctgcgtatcacgaattaaatcctctttttttctgatcacttcaacttcccagttcataatgatcccctttccgcaagaaatgacttgcaaaaaccaaataaaacgaataatattaatggtgttttgttaaaacgttcgtaattggaggatactatgtttcatctaaaagagcagcaaacatccataaagcaagaaatcatagcagggctgacgacctttttcacaatggtctatatcgtcgtggtcaatccggtcattctggctaacgccggggttcctttcgaccaggtgttcaccgcaacgattattgcctccattgtcggaacgctgtggatggccctggcagcaaattatccgattgctattgcgcccggcatgggcttgaacgcttatttagcctttcatgtggtaagcgcaagcgatggcggcatcacgtacgcaacagctttcagcgcagtatttacagcaggggttctcttcattattctatcgttaacgcctttaagaaaacaacttatagaagcgattccaaacaatttaaaatacggaatcacaactgggatcgggctgtttattgcttttatcggtttgcgtcaagcgggcattgtggcagctgatgagtcaaacctggtcactctcggcaatctgcattcacctggtgttattttaacgctggtcggccttttgatcagcgtggtcctgatggtgctgaatgtaagcggcgctttatttatcggaatggcagctaccgctttgatcgcctttttcaccggtcagctccattttccaaagggatttatgtcgcttcctcatttgccggaaggattgatgatctcaaatccatttatcgcttttggcgatgtcattcatcacggcctgtacgctgtcgtcttttcttttctattagtcaccatttttgatacgacaggcacgatgatcggagttgccgagcaagccgggctgatgaaaaacaacaagctgccaaacgtgcgaaaagcgctgcttgctgattcaaccgcgacaacagtaggagctgttttcggcacaagtccaacgactgcatttatcgagtcttccgccggtgtcgcagctggaggaagaacggggcttacggctttgactgtcgcggtgatgtttgcggcttcaatgtttttcagtccgcttgtcagcgccttgtccggtatagccgccatcacctcgcctgctttgattatcgtcggcagcctgatgatgggttcagtttccaatatgaactggaaagagatggacgaggcatttccagcgtttctcgtcattctggccatgcctttgacatccagcatttctacaggaattgcgcttggctttatttcatatccgatcgtaaaagcggcgcggggaaaatggagagagattcatccgctcgtcatcgttttcgccattctgtttttcatccagctgtttattttataacatagaccaaaaaacccaaacgtcgccgtttgggttttttatgtaaacaataaagagacagcggccgctaaaaaacaacaggcggcaaacgcatagtgcaggatattgatacagctttttctggcccgataatattcatcactttccttatcggcgccaattaaaaaaggggcatccatgaccttgtcaaaaataagcgtcaggatataacggcaaacccctgtgtatactagcagcgcaatcaccttcagccaaattggggaaacaaatatgagaacagtgaaagctgacaatagcatgtacatctgcctcgcatactcgccattcctcagcatgactttaaaaaacaattccttatagcctgtgcagatcgttcgtcttttaaatatcctttttgaattacggtataataacggttttcttctcatcctgtcttttacttttggcattcccgcctcctgactcatcatcatcacaagtcctgcaagagcaagcctgctttttttctcttcagtcacctcagcttcaaaagccgtgaacgaagccgtctttttcaaactgcggataactgagaaaagcaaaaataaaatgccaaaaagcgcaagcaagtgccactgagtcaaaacaatcaggatagcagaaccagcaaaaaatatagctctgacaaaaatatcgccaatccatctcgaaatggagcgcggctttctgatcctgtcttgctttaaggataaaaagaatatatgaaggccaaacaaataagacaatagagcagtgctttctgcgaatgtgatgtgaacagaatgactgataaggggaaggacaataaaaaagagaagcagccatttagccagcgtgaccagaaaagaatacaaaagcgcgtaccgtttgagctgatagatgatttccttcttttgcagcaaaaacactttgtccgcttccattaaaaatgtacgaatcgagcctgtaaacatgatcagcccacacacagcgtacagccatctccactccgccacttcagaccactcataaagaaggcctcttccattcatcaaatcaatatactgatagatgacaaaagcaatcgccggcaaaacgatgtagagagcgactgtccagtcaatgaccgcatgcaacactttaaactgatacttgtaatagtcaaacagccttcgaaaaaagagcgtacgcccgttcatggccgatcaccttgaactgccttataaaaacagtcaagcaatgactgcccctctaatccggtcttgtcctgaatatcttttaacgtgccttggagaaataatgaacctttctcaatcatataaaaccggtcacagattttttccgcggtatcgagtacatgcgtgcacataagaattccggctccacgttctttttcagccttaagcatgtccacaaagcgtttcgtcgatatcggatcaaggccgataaacggttcatcaatcacatacatatccggcttagagagaaaggcctggataagcattagtttttgctgcatgcccttcgaaaaggtgacaggcagctcatgtttgacatgatcaagcgaaaacgtctgcagcaggctttgggcccgatgcgcaaattctctctcttcaatgccgtggagtgtgctgatcagatccaaatgctcccacagcgtcagttcttcgtaaaaggacggatgctccggaatatatgcaaatgaacagtcgttccaggcaatatgccctttaaaatcttctgaaaggccgagtatcgccttgattgcggtgctttttccggcgccgttagctccgatcagtccaaccagctccccttttctgacttccagaaaaacatcggtgagcactttttttcggcttgtatacccggcctgttctattgaagcttcaagcaaatttgtcaaaactcacccacctccaaaatttactacgaaacagaataaaaaaagtttctttaaccataataatattgagccgaaatacatagtaatccaacaaggatggctgcccaacgcgaattggaaaaaattaataggagttatccctagattcatcactgcaatatcgtgtataatgagggcgaattattttaacagttacagatgtctgcctttgttgctatttcgtacgcagttgatagtcgtgagttgtggttagtcaagtccatccgatcttatgatagggagtggttttttgaaaccttcaacaaaccgtatgctaactcgaatcaaatcagtttacatgtttatccaagaaaaaggtcttgtgacaacacaggaactggttgacgaattcggcattacacctagaacgattcaaagagacttaaatgtgttggcatataatgatcttgttcatagtccaagccgtggcaagtgggagacaacgagaaagaaagtaaagattacctcataaattgaaaaattacatagggccgcctgagagcggtccgatagataatagggcgaagaaactactgagccttgtttttgtgtgcttataaataaaaccccgcattcggtatgcggggtttttgtcatgcttgcggctcattgagcaaatgaagctcttcctctgtcagctcacggtattctccgggtgccagagcgggatctagggaaacgcgtcccatcgaaagccgcttcagataaaccacttcattgccgacagcctttgccatttgcttgacctgatggtattttccttctgtaattgtcaggtatatcacggtattgccactgtcgtttgttttgatttccgcttttgccagctttgttttatagccgccctctatgtagacacccgtttccaaatcggagatgtcttcccgagaaatctgtgattttaaatggacttcatacgtttttggaacatgctttttaggagaaaggagccgatgtgcgagctgcccgtcatttgtgagcagcaaaaagccctctgtatctttatcaagcctgccggctggaaatggctcaaatctcatctcctccggcgtcagcagatcgaccactgtttgctgccggctgtcctcagtcgccgacagcacgccctgcggtttattcatcataagataaatgaactctcgataatcaaccggttccccgtatacggtcacctcctgcgtatcaggatcaacgtgcgcctttacatctttggcaggtttgccgtcgatcatcacggctccagccttcacaacggctttgacttcttttctggaaccatacccgctgttggcaagcagcttatcaagtctcattcccaatctctcctttataaaagaaagcccgcagcatgcgagccctcagtttcatcatatctagttcatcagcctgcatgtctgcctttctttaagaaacctggcaaacggcggcctaaaattttctgtaaaaatcctaatcggtagccacaatacaggtagacagctccgccaacagcggccgcgatcaccacaacaatcgcagcttgcagctggccatcctgataggaaataaagaagcctaatacccactgcacgattttcacggcaatacccataatggctgataagacaagcatcaaaacagttcgtttaactagtatcttatacgaatagcctgcatggcgcttaatcatgataaacccatataaaagggaagcgatatatccaagcgccgtcgctaaaatcgctccgtcagcctgcatcagcttgatcagcggaacattcagcacaagcttgatcacgacgccgatcacaaggctgacaaccgcaaatttttgcttattgatgccctgcagaatggctgcgttgactgtaaacaaagagaacagaattgcgactggcgaataccatagcaaaatgtttgcccccagttcagggtgaaggctctctgacccgtaaaagaacgtatacgtcggtcctgacaatagagagatcccaacaacagccggaataattaaaaacaggatcgtctgcatcgtttgattaatctgctgatttaacagcttatagtttccgcttgtaaacgattcagtaatcgttggaattaatgtcagtccgaaagcagttgctagggaaaccgggatcatcacgagcttctgaacatacagggttagaatcgcaagcatgtcttggctgatggcttgatgaccggcttcaatcatcgctttgttaaacgtatttgtatcaatatagttatacaaagggatagctagtccaacaaaaacgtacggagcagcatagctgaacagctcgaaaaacattttcttgtagcttaggtttgctgtcggacccgtattcggcatcatcgccagcaggctgcccttccgtttgttccaataaatataaagcacgaccagccctccgaaggcaccgatcagcgctgcgaaggttgcatagccgacagcgatgacaaggccgccgttgaaaaccttcaaaatcaagaatgtcgcactcaatagaaagatgatgcggacaatctgttcaacgacttgggaaacagctgtcggacccatcatttggtgcccttgaaagaatccgcggacaaggctcataatcggtacgaccaatagcgctaagcttaccatgcggatgacataaacgacatgatcaattgtcaggccgttattatccttgcctcccagcgatatttccgcaaacatcggagccgatagatacagaatgaaaaaggctatcattcctgtgacgagcataaccgacatgcccgccttgagcattttcctgcttgtctcataatccccttttgaattatatttggaaacaaatttagaaacagcggccggaaagcccatcgtagcaatattcaaaaataaagtgtattggttgtatccgtattgaaataatgcaccgcctgtcgccccgaccataatgctgaagggaattaaatagaccatccccagaatccgcgatatatatgtaccgagcgttaatacaaacgtgcctcttaacagtttgcttgacatgtttcttcatcaccattttctacgaagattcaacttttctattttaccacaactgggcatttagacggtaataaatacaaaagcaatcctgtgaacattcatgtccgcggcaaaagacgtttaaggagcggctttctttcgctataatagtactgcggacggggtgtccgcacacgaaatgaaaagaaagttgatgataaagatgaaacaatatgacgtaattgtaatcggcggaggcccttcaggcttgatggctgcgattgcagcaggagaacagggcgctggcgtgttgctgatagataaaggaaataaattaggacggaaactcgcgatttccgggggcggccgctgtaatgtgacgaaccgccttcctgtggaagaaattatcaagcacatccccggcaacgggcgttttttatacagcgcgttttctgaatttaataatgaagacattatcaagttttttgaaaacctcggcattcaattgaaggaagaggatcacggccggatgttccctgtgaccgacaaagcccaaagtgtcgtagacgcgctgttaaacaggctgaagcagctccgcgtaacaatcagaacgaacgagaaaattaaatctgttttatatgaagatggacaggcagcagggattgtgacgaataatggcgaaatgatccatagccaggcagtcattatcgctgtcggcggtaaaagcgtgcctcataccggaagcacgggagacggctatgaatgggctgaagccgcgggccataccataacagagctgtttccgacagaggttcccgtcacttctggcgaaccgttcattaagcaaaaaacactccagggcttatcactaagagatgtagccgttagtgtgttaaataaaaaaggcaaaccgattatcacacataaaatggacatgctgtttacccatttcggcctctcaggacctgccattctcagatgcagccaatttgtcgtaaaagagctgaaaaaacagcctcaagtgccgatcagaatcgacttgtatccggatatcaatgaagaaacgcttttccaaaagatgtataaagaactgaaggaagcaccgaaaaaaaccattaaaaacgtgctgaagccttggatgcaggagcgctatctcctattcctgctcgaaaaaaacggcatctctccgaacgtatcgttttctgagctgccgaaggatcctttcagacaatttgtaagggactgcaagcagtttactgtcctcgcaaatggcacactgtcgcttgataaggcatttgtcacgggaggcggggtatctgtaaaagaaattgacccgaaaaaaatggcttctaaaaaaatggaggggctttatttttgcggtgaaattctggatatccacggctacacaggcggatacaacattacctccgcccttgtcacaggcaggcttgcagggctaaatgccgggcaatacgcccgttcttaatcattactctttaaatctcttgccgccaaactcacatttgaacattccccgcattcatgttagggtgagacttgttttgtttcacctgattgcggggtaattttaagagaggaatgagctgccatcgtacgaccatactaagcctgcgagcaagatataggcgtacacaaaaaattagagggtgagaaatgttgaaacatatatctagtgtattttggattgtgattgcaatcacagctgcagctgtattatggggtgttatttctcctgacagcctgcaaaatgtgtctcaatcggcacaagcatttattaccgattcatttggttggtattatcttttagttgtctctttgtttgtcgggttttgtctctttttgattttcagcccgatcggaaaaatcaaactcggaaagcctgatgaaaaaccggaattcgggttattatcatggtttgccatgctgttcagcgcaggcatgggaatcggcttagtattctacggtgcggctgaaccgatcagccattacgcaattagctctccatcaggtgaaacagaaaccccccaagccttcagagatgcactccgctatacgtttttccactggggtttgcacgcttgggccatttatgccattgtggcattatgcattgcctatttccaattccgcaaaggcgcacccgggttaatcagcagcacactgtcaccgattctcggggataaagtaaacggaccgatcggaaaggccattgactgtattgcagttttcgccactgttgtcggggtgtcaacaagtcttggtcttggcgcaacccaaattaacggcggtttgaattacctgttcggcattccgaatgcgtttatcgtccaattggttttaatcattattgtgacagtgctctttttactttctgcgtggagcggactcggaaaaggaattaagtatttaagcaacacaaacatggtattggccggattgttaatgttgtttatgctcgttgtcgggcctacagtgctgatcatgaactcatttacagattctatcggacaatacattcaaaatatcgttcaaatgagcttcagactgacaccgaacgatcctgaaaaacgcgaatggattaacagctggacgattttctattgggcatggtggatttcctggtctccatttgtcggcattttcatcgcccgtgtatccagaggccggacgatccgagaatttttaattggcgtcttggtgacaccttgtattttgacatttctatggttctccattttcggcgtatcagccatggatctccagcaaaaaggcacgttcaatgtagcaaagctgtccactgaaacgatgctgttcggaacacttgatcactatccgctgacaatggtgacatcgatccttgcattgattctgatcgcagtattctttatcacgtctgctgattcagctacattcgtgctgggcatgcagacgtcgtacggttctttaaatccggcgaattctgtgaaactcagctggggtatcattcagtccgccatggcggctgtgctcctatattccggagggcttgccgctttgcagaacacagcgattctggcagcgctgccgttttctatcgttatcctgctgatgattgcctctctctatcaatcgctctcaaaagaaagaagagagatcaaaaaagcggagaaactcgataaaccgagaagtcctagagtgaaaaaagcatattaacaaaaaagatctttccgcgcctgcggaaagatctttttatttgcgatataaaataagggcggaaaaacagtaaagctgctcgccgtctgggtcgcacgcggccgaaaccgtatatttgatatcaatcagctgctcctccgatatcccttttaaaaatgaattgatttccgtctgtaagtctttttcatgctcttcatcaaataccgctaccttcagcattttatccgctctcctttctctatcaatctattccgtttggaacagcgttatgatagagaaatgatgattatctcgtttccggataaaaagctttccgtatatgggattccctctgtggctcgccgccttgctgctccactttcagcagcacggcataaacaatgcgcatatgacagtagctgataaggctgacgctgaaaaaagggacaatgcccggcaggtacgcaagcaagaaaaaaagagcaacagtcagcgcaagcatagcaagcgtatattgcaaatacgccacactgagcaagagcgaaaatttcacatacagacgttttttccagtcaaaatggacaagcagcggaaacacataaaaaagcatggatacgaacaaaaagccaaatatcataatggcgaagcgcaggatgtgcagaaggaaatgacttggataaatgaaggccaaatcaatataaatgatcactccgatgagcgccagtacagcgccgagcagatttgaacgaaaaaattcacccttatattcctgccaaaacgttttgagcacgggaacgttgtcctgcccctgaatccacttccgcatgacagcgaataaagccgcggtcgcgggcatgatgccaaacacaccgagaccgagcaacgtaaaaaacagccacagcaagtttgtatacgcaaatctcatgatccattcgcaaaaacgcagcatccgtcccagtgagccatcatgttccatggcgccccctcctttttttgcattatacattctgcatctgaaaaagctctttcatgccgatcggcttcttttcggcaaccgagcgccacattccctcaccaaccgcgatggagtaggctccagcttcagccccggctaaaatatcatagcggcgcagcgggtcttttcctaaaaaaagatcctcaagcaaaagcggatcacctccgccatgccccccttcatttttgaccacttgtatcgtctgctttgattcaaaaagcggatagtattcgattgtctgctcaggaaaagcaaacggaattctggaaggttcgtgaaattcatttgattcaatacgcccttttgtgccgttgatcgtcagccggtagccttcatacggtgccgaaaaaataatcgagtagcttaacagtgcgccgccatcatatttgactgccgccacgtacgtatcctcgatgtcaatttcctcgtcaaaaatacacgcgtcaggcctgtatgcagtatataagctagactggtctcctgcttcgagatgatcatcttttatagaagctttagaggaacggggatgccaccttgaatagtagtggcatttttctttaacacggcacgtcccgcaaaaacgcccgtcttcttccggcaaggggttccactcactgtccggcccatagtaattcaaggcgccataagcaaatacctcttccggattttgcccgagccaccaattgacgagatcaaagtgatgtgttgatttatggacagaaaggcccccggaaaactgtctcgacctgttccagcgtttaaaatagctggcgccatgatacgtatcaatataccaatttaaatcaacggaggtgaccctgcctatttttccgtccagaatcatttcttttattttccgatgaaacgggctgtagcgatagttaaacgcgacggtgacttttccttcgcttttggcctccgcttcaagcacccgattcgcatcctgcactgttgtcaccattggtttttcagtaattacatctgtatcccactgaaggctttttacaatatatgtgacatgcgtatcgtccctgcctgccacaatgacgatatcaggctttgagacgcgcatcatctcgtcaaaagcatcttcgctaaactcaggcacgtgggccagctcgggaaatttctttttgcaaacggcaaaacgtttcggatcggcatccagcaatcccgtaatctcataatgagttgaaaaccgctccaacagcggtttgataaacatactgaatgctctgctgctcaatccgcaaaagacgatgttcttcaatatcctcacctctatcgggcttcagttagttgagaaatcagctgcagcgcttcctctgttttttcagcatacacagggataaacgccgccatatcgcgattcaatcgaaaagaatagccgttcagctgttttttccctttttcgatctgaacggcatagatcgttttttctcctgttttattattaacagttgtataaggagatgttttttcaggaggcaatccgtttaacggctgaaaattttccggatcattgtaagcttgaaacatgtcttcaggcacgatgaaaacatctccctcatgggcggtaatttcagtcagcagtttttcctgaaaagctggaaagatatcgaccttcccagcattctgctcggcggccttttttattttttcctgtacgccagcctgcatatcagaaaagagaatgacatgcattccgtccgtcctgcttgagcatgatgccaaaaagagcactgagacgatcacacacaaagccgtacgtatcctttttgtcatttccccgctgacctaaaaagaggctccagctctgtcatagctaaaataaacgcgccggctccgtgcagatcgtttttgcttctttcgcggctgacataatagtcatagaaaccggctgacgttccgacacatatgtctttgacgagaaacgcgccgtcttctgatgtttcggttttatgctgaatcaagccttgatacgcttttagcagtgttgtttcgtaagctctgtctaaatagcctttattgattcccttcgcaaatgcgtacatgtacaggcaggatcctgagctttccagccagttatcagacctgtctcccttatcaacgatctgataccataaccccgtctctttgtcttgatagcggcagatgctttccatcatgtcctgcagcgtgtttttccacccatgacggtttggatgcttcttcggcagctcttcaatcatgtcagcaagagacatgacgtaccagccgatggaacgtgcccaaaattccggtgaacagcctgtctcttcattggcccaaggcatttttttcgcttcatcccaggcgtgataaaagagtccgttttttgcatccttcgtatgctttctcatcaatgactcctgcagcacgacctgatcaaacagctccggctcctgcttcagattggcatatttcagtgcgaacggccccccatgtataagccgtcaagccacatttggtatggataaccgtctttgtgccaaaaaccgccctcagacgtccggttcagtgttccatataaaccgcgcagcctttttgccgctttggcataccgttcatccttcgtctgctcgtataatggaaaaagaatgagacccgcttgaatggcgtccagttcatctcttctaaataatagattgccataatcatcgattaagagatctgcataggccttcgcatactcaaaataccgcttttccccggttgcttcccacagccgcaatacaccgcataagaaaacaccctggtggtagtgccagcggtttgcaggaggcagctcctggactgtgtacgtattcataatggtttttgccaatgcctccgcgtacgtaagaggcgattttacagcgattgattgatccattgatcccatccctttcttaataaattccttcctcgccaaatttcttcgctaaacgattcgcaagcatgaccaaaatcagcccgaccgccgctttaaatacgccgactgctgtactgtagctgaattgtccctgtttcagccctgcagtataaacgtacgtatcaaaaatttccgccacttccctgtttgtcgcatttaacagcaaatacacatgctcgaagccaagctccagcgtgtctccgattttcaaaatcagcaaaacgacgataacgcttttaatggcgggcagcgtaatatgccacatttgccgcagccgtcccgctccgtccattttcgccgcttcatacagctgggggtcaaccgctgtaatggccgccagataaatgatcgtcgaccagcccgcttccctccagataacctgaagaatatacaggggccggaaccattcttcgttcagcagaaaattgattttttcaccgccaaaaaacacaatcagttcattaatcaagcctccgtctaccgttaaaagcacaaacgaaagcgatacaacaatgacccaagacataaaatgcgggatataaatcagcgtctgaacaaattttttaaagagagcaatccgcacttcgttcaatagaagcgccagcagtatcggcaccgggaaaaatatggccaggttcaaagcaaataacacgagcgtgttttttaacaagagaaaaaatgtaggctcagtaaacagcctgataaaatgcttcagccccacccactcactgcccaaaatgccgaggaacggctgataatcctgaaacgcaatcacaattccccacatcgggacatacttaaaaagcaaaaaataaatacaccccggcaaaatcatcaagtacaaatatttttgctgaatcagcttgattagtaagcgctttcttttttcttttttaaaaatgactgtatcaacagccggcgcttgcgcttctgctgttttcattttttcccatcctcctttcacgggttcttgcattcactgtagcgcagaggtaaaagtccgtctacaatcatatgatcacatcctgttttatccctttataatcaaaggttcaggaggtccacctgaaaaaaagacaccgatattagaaaatgattattgacaatatctatcaatctttggattaattgtattaaggtgaagtggatgttatgaaatggggggttttatgaaaagaagccaatacaagttttactacaaactgattacgtttttctgcctgctcagcaccattccggttattttggtcggattgttttcgtacgagcactctcagaaaacggctatatccaacgtttcagaggaaaaattcgacacactccagcagacccagcaaagcatcgagcatatattgaaaaccgtcgatcactctttaacccactatgtgagttcgccgcctctccttcgcacattgtccgagcctttgcactcagaccaatttcaaatctataaccaagtgaaccaagagctcaattatctgcaaagctttgataccgatctgtccaacatgacgttagtcagttatacgaaaaaatggtacatgaacaattccggtttgtaccgtttgaatacagacactcttcatgaagcagcctcagcgtacacgaaacaaaaagcgagccgctcctattggacgcttgaggaaaacaatcatttgatttcaaccaaagaaggcacagcagaaaactgccgctacaatatcaatttaattaagcagcttcctttgaacagcacaaatacaaagggattggccgccgcaagcatcccgagctgttcgcttgtcaaaaatatgcccggctattcaaacgccaacaacctgtttatcatcgatgaaaaaggcctcatcatccttcataacaatatgtctgacgttggtgaatctcttcataacgacggctttgtccaaaaagtgctggcgcaaacggccaatagcggacagtttgaaacagttattgaccggattcattataaagtcacctatcaaaaatctgactataatgcatggacttatttttctctcgtttccctgcctgagttaaaaaaagaagccaaatcaatcggctggatcacttttgcagtatgcctcattttgttaacgctttcattgctgttctcttggcttggctcccgccatttttacaagccgatcagggtgctttacgaatcattcgcaaggcatggtgccatacaagaaaaacagccgcctcaaaatgaatttgagttaattgaacagagctttaagcagctgaaggacagaaatgatgatcttgaagaaacgatgaagcagcaagccacccacctgcagcaatattttatggtcaggcttatgctcggaaaactgacggatgaggaggttaataaccgttttgaaagcctcggtttaaagcaaaattggcggcaccttgccctgcttgtgctccaaattgacacactgaatcatacgccttatgagaaaaaagatatggatctgcttttgtttgccgtcaacagcctgattgagcgcaacatcccgacggacaaacatcttgcccccgccgtagttgacaaacagcaggcgacgattttgatcaatcaaagcgggacaaaggaagaattcatggctgagctgaatgagactgcaaggatgattcaggaaaaagcggaagctgagctgcagctgtctgtcagcatcggcatcagccagccgtttgatgtgctgacaaaagcgaaaacagcctatgcggaaggctcagaagcgttgaaatatcggctgaaagcggaaaacaagtcgatcatcttttacgaagaccttgaccagaaaaaaaccttcaaaacccattttccaaagcagcttcagcatgagctgttcgatgctgtcaaagcaggagacaaggagaaagcggataaatgcctgcacgcgattttacaagccattttcacccagaacaccaacccgtatcaatttcaaatcgccatcgcccgttttttgaaccatgtgattgagctgatgcatgtgcttgggatcgaattgtttgagcttgaagaaaacaaaatgctgtatgaccaaatttttgagctgaaaacgttcgaggataccgaaaactggctaaagaatgagtttattgatccgatgacagacaaagtgaacgcccgcgcggatgcccagtacaaaaatatttccgacaacatcattcatatcatccatcatgagtttgaatccgaattgacactggacgaaatcgcacgcaggctgcattacaacccaaattatttaagcagtattttcaaaaaagaaatgggaatttcattcagcgagtatgtctcaagctaccgacaccatatggcgaaaagctggcttgccgaaaccgacatggcggtcaaggacattgccgaaaagctgaaatataaaaactcgcaaaacttcatcagatcatttaagaagctggaagggattacaccgggaaactaccgccagcaaaaaagaagcatgtaaaaaacccaaaaccgcttgcgcgttttgggtttttccaatgttattttgcttgtttaaacgcttcttcgtattcctgaataatttgttttcctccgcttgactcccatttttccacttctttatcgaactggctttctgtgatgtctccaatcatatatttgtaggtcgcgtcatcaatgattttcttcagttcgtcaccccgttccgactccgatgcggaatacaggctttcagccgggtttgagacgataatcttttcattgtcctcggtcagctcctcgtacgccgtccgaagcggatctccagtgttttttaagtaggctttatcaatggcaattaaagcggacagcggctgaatatcagtctgccagtcttttacctggctttctttgcgtgtaaacgttttgtcctcacctttgttgtaatgaacgccgtcaatgccataagtcatcaggctatagacatcttcttcggcaattcggtcaaaaaacgccaagatccgtttaagctcagcttccgttttcacactcgttttcgggaaagcaaacacgccgttatggcctcctgatgcccatacccgctctttcccatctgggccttttatgcggttgatgatctcgagcttcatcgatttatcagaggcatggtcgcgcagattgaccgcatctaccatattgccaatataaattccggcttttccttgagaaaacagctcctgctgctgggttttgcttgtgacgggaaaatccttattcatatacccgttatcacgcagctttttcatatagttcatcgtgtctttgtattcctgtgtcatgaaatcaggcgtgaatttgccgcccgattccttccaatctgtcggcatgccttcatacgagccaatcgttttaaacgcgccgtaaatcaagtcattacggtctgccagcccgatcgtatcatctttcccatccttgtccgggtcgtcctccgtaaatgctttggccacttcataaagctcatccaacgttttcggggttttcaaatttaaattgtccagccagtccttccgaatgacgatcccctgtctggaaagcgggcgctctctgtatatcccgtagagctttccgtcaattgtcacatttttattaatgagtttgttcattttgtttaagttgggataatccttgatataatcgccgatttcccaaaacattcctgaccgaaaggcattcatgactgacgaatttttaatatcctggatggtcacgatttgcggaagattcccggctgcaagcgctgcattcagcctgtcttctttcaccgcgtctggaacccaggtgatgtcgagttctgtatttgtcagcttttcaatttctttaatcgccctgtccttcggcggctgctgatgatacaaaatcgccatccaagacagctttatctttgaatctgggccagctttgccttcagccgaagactgatcagttcctttacagcccgccagcactccgccgagtgccagtacaagcacaatcaaaagcaccctccatttgtttcccatcgtacccctccgtttcatatttctttatcctttgacagatcccagcaaagctccttttgcaaaatgcttttgtataaacggatagacaagcagaaccgggatggtcgccaccactatgaccgccattttaatggtttgctcaggcggcgggctgcccgaccccatttcagacatatccccctgcataccgcttgatacaatgacgatttggcgcagaagaacctgaattggccattttgctgaatcatttaagtacaagatcgctgtcatatacgtgttccaatacgtgaccgcataaaatagtgaaatcgttgcgatcgcaggaagagacagcggcagcacaattttaaagaatatgcccagatcattgcacccgtcaattttcgcggactcttccaggcttgatgggatattttgaaagaagtttttcagaatgatcaggttaaaggcattaatggctgtcggcaaaataagcgcccagtaagaatcgagcaatccaagcgatttgaccacaaggaaagtcggaatcatgccgccgctaaacagcatcgtaaatacgacgagaaacatgagcggctgccggccgattaaatcatggcgggataacccgtaagccatcagtgaagaaagaaacatgctgaccgcagtgcctatcactgtcacaaacacagaaacaagcaaactcttataaataatatctgttgaaaaaatgtagcgataagcatctagcgaaaaagtggtcggtattaaaataaattttttcgacacgacttcttctactgtggcgaaggatgctgcgatgacatgaatgaacggaagtacgcatattaaagcgaacatcagcaagaaaccataaatcaacatatcaaacagacggtttttcagtgaatgtgcgatagctcccacctctctttgtaagcgttatcatatttcggaaaccgagctcagcatgtgacgatatcgtgtctaaaatgtagcaaatctgtgattgccatgtctataatcatttgaacagtgtccccggccgggcgggggctgccgcgaattgagaccgataacaaaagaaaaagagcataatcttagaaaatgattatgctccgttctcctcctcgttcagaagttcagccgtattgatttgtggcgaaaacccaagttcattcacggcagattcaatggaccatggccggcccggattatcagagacggcgtaataagtgccgtaccggatattggtctcaatagcggctttgaaaatcgacagcagatcggggtgagaaagcagtgtctttttcgtccgttctttttcatgcagcgtatccatttcatctgtgacgactgttccgattcgcaggttgattactgatagcttattttccaaataaaacaaatggccgatctgttcagaggtcagctttaatacaccgtacaagttttttgacagcggataatcgcttgttgtgatttcccgtcctaagagcgagcgcccgtctttttcgtagacatctgtgacatgattactgctggcgaacacgagcttttgaatgccgagctccgctgccgcacggcacagataatagcttgccctatagaaaacatccgtcattttttcaaactcagcgatgtccataatatcgtatttgattttcacagcgagtaaattcaagatgacatccgtatcttttggaatcttcttcaacagctcctcataatttgccgcgtcagcctgaatggaagaggctttgccatcgaaatgatctttatcaagcacagtcacttcatagtctgaaataagcccttcagcaagcagtctcccaatcacaccatttccgccggcgatcagcacttttttcactatgttcactccccttttttatagattgcccattttcggcggggctgacacttttttggcactcacattcttaggcttattcaaaagtcaccggcagctcctcaagcgcccgaaatccaaaaagcggccgataccgccattcaaaatccgcgagattaaggctgggcattcgctgcagaagagtgttaatcgcaatttgcgcttctaatcgtgccagcgaggaccctaagcaaacatgatggccatgcccgaatgaaagatgcggattaggacttctcgtaatatcgaagacatcggggttcgtgaatatgctagggtctcgattagccgcccctaacaaaagatagacttgttctccttgacggatcgtcaccccgctgatgtcaatatcctctgacgcaactctggctgtcatttgcgtggggctttcatagcgtaaacattcctcgactgcggtatcaataagatctggattttctctcagtttcaaaagctgttctggatgctgcagcagacaaaggactgaattgctgatgagattgaccgttgtctcatgtccggcgatcgccagcaatatgcacgtagatgccgcttcctcttccgtcagcttatccttttctttccccttcaagagcatgctgatcatatcctgttgagggtggcgttttctcttttgaatcagctctttgaaatatgccatagcctgcacagccataatattgccctctgttaatgcctttcttgagcgggtaaaatcaatcgtttgaatgagactcgcagcccactcctttaattgctccctatcttcctccggtacacctataatgttagctatgacaaaacttgctaaaggaaaagcaaagtccgaaatgacctccatcttttttttaccttgcacttgatcaagcaaatgatggacagtttcaatgatatacggctgataactctctgtcgttctcggcgtaaacgctccgctggcaagcgtccgcaatcgtctatgatcaggccggttctgaaacagcatcatttgattttgcacatgtgaaaggtcctgatatttggttgagctctcaggcagcggggtgcggactttgaatctcgcatctttcaaaatagcagccgtttcttcatatcctgtgacataccagcccgggtattttaagaaactccctttatagataggatgaacagctcgcaatgtgtcgtaaaaagaatatgggtttttcaaaaactcagaagatgcagttgacgatgcaattgtcacgtgattttctcctttctgttcaaaaataaaagcaatcgacatcataccgattgcttttattgattctttcagcttttcgcacttaaactggccttcatttcttcgactgattcaacttcaaagcctaaatcactcagcattttatgatcctccgtctcctcttgcccggcagttgttaagtagtctccgacaaaaatggagtttgcggcgtaaagccctaatggctgcaatgagcggagattgacctctcttcctccggaaatgcgaatttcttttgatggattgataaaacggaacagcgccagcacttttaaacaatacagcgggtttaattcgttgacgccttctaacggcgtgccatcaattgcatgcaaaaaattcaccggaatggaatccgcgtcaagagccttcaagcttttggcgatgtcaatgacatcctgtttcgtctccttcatcccgataatggcgcctgaacacggagacagccccgattcttttgcgatttcaaccgtattgactctgtcatcgtatgtatgtgaggtcgtgatgtttgaatggtttctctgtgacgtattcaaattatgattatagcggtctactccggcatctttgagacgcttcgcctgctctggcttcaacagtccgagacacgcacaaaccttcagtccatacgtctctttaatttcctgaaccgcatctacgacctgatccacttctctgttagacggccctctgccgcttgccacgatacaatatgtgccgatattcagatcgtgcgcccgcttcgcgccttcaagcagcgtttccttattcaccatccggtaagactcaatcggcgctttcgaaatcgcagactgtgaacaatagccgcagttttccgggcagagcccggatttcgcattcataatcatattgagctttactttttttccataaaagtgttttctgatatgaaaagctccatgcattaatagcaaaatatcttcatcaggacaatgtaatattgaaagcgcctcttcgtcagtcacttctgctccagccagcacccggtctgcgagttccatccattgattcattctcatacccccacttgattcatcagtaatgatagattgatatggtcttttaccatatgtagaaccgtttctttcgtcacgttggcaagctttggcgtaacccctaaaatcggcacaccgcataagcgctcaatcatctcaggattggttttttcatcttcatcaggagagtcactgattccattgatgataattccggcaattggaagccccatgctttctgcatatttgacagttaaaaaggtatgattaatggttccaaggtgaggacgtgccacaataatcatgggaagctgcaacgcttttatgacatgactgaccaaatagtcctctcccaatggcacagaaataccgcctgcaccttctacgatgaagcattcatgtttttctctaatccgcccccaatggcttaaaacctcttccatggtgacagtctttccctcaagtttccctgcaacgtatggtgcaagcggcgctttgaaggcaaaaggcgtaatgtcttcatgagaaagactggtctgcgacatgtctttcagcaaacttgtatcactatctggatgatgacgcgatatcccgcttaaaaatggtttatacacaccgacatctctattatgttctttcaataaggcagcaagaccgctggatataaccgttttccccacttctgtatcagttcccgtcacaaaaaaacccctcaaatgatatgcagctcctttccgattgaatgaaatgttttcagcaaatcatcaatatcacccatactgtggtcagacgtgattgtaattcgaatacggctttcacccggtgcaacggtcggcggccgaatggcaggagcataaattcccttgccctgcagtttttcagcaaataggaccgttttatgggcatcgccaatgactacaggaataatcggtgtgtgatctcctttcaccacataacccatattcttcagactggttctgatcgtactgatataagaaaataaaagctgtcgtttttccctgctggcttcaatgatgttgaaagcctcatgagcagccgcacagctggctggcggaatagcggtttgaaagataaatgttctggcatggttcagcaaaaagtcgatgaagaccgctgatcctgccgcaaaacctccttccgcgccaacagctttgcttaaggtgccgatcacaatgtcgggacaaacaccaaagtattcactcgttcctcctcccgaatcgcccaaaactcctgttgcgtgggcatcatcaacgaccacgaaggcatgatagcgtttcgcaagtgagatgatctgatcaagaggggcgattgtgccatccatgctgaataccccgtctgttacgataaaacggcgctgataacgctgtgtttcattcagcttgttttcaagatcattcatatcaatatgccgataaacaactgtatcagccttagaaagtcggcagccgtcgataatacttgcatgattgagctcgtcacttaaaatgacatcttccttttctggcaaggatgaaaggagaccgacattggccaagtaaccgctcgaaaacagcagggccgcttctgtccgtttaaagctggcaatcttcttttctaacttttcatgccagaccgaattgcctgtcgttaaacgtgaaccgctgcttcctgtcccaaattgctgcaatgctgtttgggctgcatcgatcaaacgtctatcgcttgcgagccctaaataattgtttgaggaccagaccgtttgattttcgccatcaatgttccgctctggaaccggcgctccatccattgaccgcaggttacggtgtacgccggcttcctttactatgtctaaccgctcgtttaaccaggaatcaatcttcaaggctcgtaacctcgtggatcgcttgtttcataatggcaaccatttccgagagctcttcagctgtgctggcaagaggaggaagaaatgcaatcacgtccccaagcggccttgtcagcattcctaactctctcatttttaaggaaactttgtatccaatccgccgatcagccgggtaaggttctttggtttcctttgatcgtacaagctctgcaccgcacataaagccaagctgccgaatatccccaacataaggaagagcgtgcagatcttgaagaagaaaatggagctttttactttttttcgctacttgttccacaatgttttcagattcaaataatgccagattttcaagcgcaactgcacagccaagctgattgcctgtataggaatggccatggaaaaaggtttttaggttttcataatcatcatagaatgccttatagatgtcttcagtggcaaacgtaacggcaattggcaaatagcctcctgtaatgcctttaccggcagccatcagatcaggctggacattctcgtgctcgcacgcaaacatttttcctgtacggccaaagcctgtagcgacttcatcaacgatcattaagacatcgtatgttgtacatagctcgcgcacgcctgccaaatatccttccggcatcacgatcataccggaagccccttgtaccattgattcaatggaaagcgcggcaatttcctcgtgatgttccttaagcagctgttcaagctctcggaggcactgatcacggcactcatcaggatcaccgctttcagagcgatacacataaggaatcggggccttgtaactctcgaacatcaacgggccgtatacgtggtgaaaaagctcaattgaaccgacactgacggcgccaatcgtatcaccgtgatacccgtttttcattgcgataaatttttgtttctcgggcttcccgatgttcttccaatactgaaacgccatttttagggctatttccatcgcttctgcaccgctgtctgaataaaagacccgcgtgagcttttttgggctgatatcgattaatgtttcggcaagctgggttgctggaacgttggtcatgcccaataacgtggagtgcgcaatttttccgagctgtttttttatggcattatctagttcttttttgcggtgtccgtggacattaagccaaactgatgaaaaaccgtcatagtattccttgccatttatgtctttgactttgattccagtcccgctttcgatgattaaggggttttcatcataatctttcatttgggtaaatggcagccagaggtgctttttacttttttctatcaaatcatgagtcatgatcttcctcccactctattaaaataggctgcttctccagatcatgtatgtacgtgtttacatcattggatccatcaataaaaaagactcggcagccctcttcagtcccgtattctttcattgctgtaatacgctgatagcccattttcttacccgcaacatagcctgttatgtaatccggatcgtccgaccagcataattctgcaacggctgccgggtgccggcttacctttgaagcgagcgcaagggcctcttttattcttgaatgagccggcacgtgactgtgaagcgcccatttttcaaaattagcgtccggccaatccattctggagacccgcacccctttttcttttgtttgatccattcgctttcctgtatgaatatcaaacaacaccgcacccctgatatctgaccattcagggatttgttcatatgctttttcaatcacgtctcgtgaaacgccttctttttccaataacaatcgggccagcttttgcccttcttccgggcagctcacttcattcgtatgcacaggcaatggctgaatggtttttatcgattcatatacctcttcaaattgaatttgcataaaatcaggttttcctcttgaatgggataaccctttttctaataaagcattgactgtatgcttcatctcatggaaaggtataagccgttctccgccggatatatgctttccgccgtcttcatgagatccattcatagaagccctcattctgacactataaaaagtttcttcttgcatcatttctcgccctttcactgataactgaagaacgtgtagtgcttctcaccttaattgttaaccaattatattttaaggttaacaattagaatatattattctctcctgtttctgtcaatagaagaaagcatcgatttatggcagttggttaaaaggaaacaaaaagaccgttttcacataaaacggtctttttcgatttcttttaacagtcacagccacttttgcaaaaaccggacagcttcatgcctcataactgctgtttcgaaatgtcccgaagcagaacggaccactcggtagcaatcagaagctccctgtccagcatagacagctgtcaattctttttcgattttgtccacgccctcggccggcgttaaccgatcgtgtacaccaacaagactaaggtgcgggcgcggcgcgatcaggccttggatctccgatgcggaaaaatgctttgcaagcgatgggacgtaataataaaagccgtgcctgtcaagattctgtgttttgatcagcacgtgatgatccacctggctgcacaaatccacacacaccttaatccggtcatcgagcgccgctgtccaccacgccatcaaacctcccatagacatgccgatggttccgatcctgtcaggctgaacatcagagcgtaactgcatatagtccaacgcacttaaactgtcataaatcatcatcccccacatcacttttccggtgagaagcatttctttaaatatctcgctttccgcttttccccgccgatctccaaatccccaatgatcaatcgcaagaacgccgtatccgagtgaagtaagctcatcagaaaaagaaggcgttttcaaataatccgctccctcaatcagctcactttttcccctatcatactggcccccatgcgaatgctgaaacaatacggctgggcacggtccttctgttttcttcggcttcacaaaataagcgggcaccttttcatgtccatttaaatcgagcaggagcgtttcaacgatattttcttctctttcttcaatacgtaatgtctcaacactgattggcctccgatcaggcaaatcaccaagcaatcgaaacagttgctttcttctttcggctctcatcccatcacccttccttattcgcttacttcacatttacgagacagatctgggttcccctttatttttccaacataaatcacatcatttactaaatatttagtaaatattatgaaatatttcgaaaacaattattgtaaccgcttacttttatatgatagtatcaatttatcaaaaacagatgagttaatattttactaaatagatgagagggatacccatggttcgtattaaagatatcgccttgaaagctaaagtttccagcgcaactgtgtccagaattttaaatgaagatgagtcgctttctgttgcgggcgaaacgagacaaagagtcatcaacatcgctgaagagcttggttatcaaaccgttgccaaacgccgaaaagcccgcgggcaaaaacagcgggctcagccgctgatcggtgtgctgagctgtctgtcccctgatcaggaaaggcaggacccttatttttcttccattcggaaagggattgaaaaggaatgctttgaacaggaaattttcattacaaattcgattcatctcggctcctttcaggaacatatctttcgggaattggatggtgtcattgtcatcggccgtgttcatgatgaagcggttaagcatatcagcgggaggctggagcatgccgtatttatcaatcattcaccagatccgcaagcatacgattcgattggaatcgattttgaatcggcttcacgccaggcgattgatcaccttttcgacttaggctacaaacggttaggctacattggcggacaagaaaaagagcatacgctgaaggacggccaaagcattcgcagaacgattgaagataaacgcctgaccgcttttttggagtcagccgccccccagcctgagcatgtgctgatcggagaatacagcatgcgtgagggctatcgcctgatgaagaaagcaatcgatcaaggccatctgccggaagcattctttattgccagtgattctatggcgatcggcgcattaaaagcgctgcaggaagccggactgcaagtgccgcgggatactgcaatcgtcagctttaacggcattgaggaagctgaatttgccagcacgcctttaacaacggtgaaggtatacacagaggaaatgggccggacaggcgtaaaactgctgcttgaccgtctcaatggccgaacacttcctcaccatgtcaccctgcccacaacattaattgtaagacaaagctgcggatgtacagcaaaggaggtgacataagcaaagattcatcacgatgataaggaggaaaagatgaaacacacttttgttttatttctctcttttattctgcttgttctgcccgggtgttcagcagagaaaagctcagcagataccgcaaaaaagacgttaaccatttattctacaatgtcaaccgacagtgaaagagatacgttcagaaaactagcggcagcattcgaaaaggaaaacagtgacattcatgtcagccttcatttcccaggcaatgactatgaaaatatgatgcgtgtcagaatggcggccaatgatttgccagatctattcgatacacatggctgggggaaaatcaggtacggagaatatacagcggatctccgggatatgaaatggactcaagatcttgatccaaatttaaacagcatcctcaaaaataaaagcggaaaggtgtatgcctatccaatcaatcaggcaaaagacggtctggcgtataatcgcaatattttagaccgttacggcattgctccgccggaaaccatggatgactttatcaaagcactgagaacgattaaagaaaagagcaagggaagcattgttcccttctggtttgccggatatgacaaaagctcattcgcccaatattacgaccaattcgctacacctcttctcatcacagaccctgcccataatgaaaaaaaacagctcaccaatggcactttcaaatggaataaatttacttacttatcgaaaatcctcaaacaaatgcagaaagaaaaattgattaacatcgacgccgtcacggcaaaaaaatcacagctcattgaattaatggcccaaaacaaaatcgcctttacaatgcaaggcggcacactcggccaagacgttgcccagatcaatccgaacgtcaaggtcggcattatcccgacacctgccatccatcccggtgatgacccgatatggatcggcggtgaacgctacacccttgcagcatggaaagattcgcctcaattaaaagaggcaaaagattttatcgcatttatggcccgcccggccaatgccaaacaaatggctgaagccacatcgcttccttcagggctgaccaatgtgaaagctgatattttctacgcaaacgattatgagcattatcaagatgtcaaagtcgagccttacttcgaccgtttatacttgccaaacggaatgtgggatgtcctaggcacggttgggcaggagctcgcggctgacattttggcgcctcaagacatttcgcagaagctgggaagagaatataaacgactccgggagcaatcggaaatacagggagctgaaaacaatgagtgagatcgcaagggacgttcatgtgaaacaggttaagccaaaaaagcagtcctcactttggtggatgtacattcctgctttgctctccgttctggtctttatgatttatccgtttgtgaaaggcacattgattacctttacaaactggaacggcttttcacaagtttaccaatgggttggattcgcgcaatatgaaaggctgttttctgatcctgacacttggcatatcttaaaaaacacgctgctttacgggcttggcagcactttttttcaaaatgtggtcgggcttctatacgctctgctcttaaatcaaagcattaaaacgaaagcggtaacaagaacaattgtgtatttgccggtgatgatcagcccgctcattatgggctacatatggtactttttcttctcctatgacggaggcgcgctcaacgatttgctcggggtcttcggcatcagccctattaatgcgctcgccagtccctcgctcaatccatggatcattgtcatgattaacacctatcaatatgtcgggattgctatggttgtctacttagccggtctgcaaagcattccgaaagactactatgaagcggcgcgaatggatggcgcgaaacaaggccagcagttttttaccatcacgctgccgctgttaatgccctccattaccattaatatggtcatcaatattatcggaggcttaaagctgtttgacgtcatcattgcactcaccgcgggcggtcccggaaatgcgtcacaatccatgtccacgtttatgtatgatttgtatttcaaacggcaggatgccggctatgccgcaacgcaaggcatatttatggcatttgtcattttgatcatcagcttttgcgcgcttgcgtactttaaaagaaaggagacggaaatgtcatgagagccgtccgtacaaaaaacatgcggatcattacgcttcttgccgccattgtggcctgtgcgcattttattcctttttatatcctgctgaccacttcattgaaagcaaaaggagactacagttcgaaatggatatttccagccaacatctcctttcacaatttctcagaggcgtgggagcgcgcttcgctaggtaactcttttataaacaccatgatcatcacaggtttttctgccttgttattaattatattcggctcacttgccgcctacccgcttgcccggagggaaacgaaactgaataaagccgtttttgccttgctgatttccattatgatcatccctccgttaacgtccatggttcctttgtaccgaatggtcgtggacgccggaatggtcaatacacacgcaatcgccattttcatcaatacagcagcttacatgcctttaaccgtattcttatattcaggctttatccgatcgaccattccaaaagagcttgaagaagccgcaagaattgacggcgcaggcatgctgaaaatcttttttacgattgtgtttcctctgctgaagccgatcactgcgaccatctgtattatttcttgtgtctttatttggaacgactatcaatttgccattttctttttacaagatcaaaaggttcagacattaacagtcgccatggcaagtttttttggagaaaacgcaaacaacctgcatttagttgccgcagcggcacttatggcaatgctgccgatggttgttctgtttttggcgctgcaaaaatactttattgccggcctgtcttccggagcggtaaagggttaacattaaagggggaagcaatatgaaaaagattacatttatcggtgcagggagcacgattttcgccaaaaatgttttgggagactgcctgttaacagaggcactgaatggatttgagttcgctctttacgacattgatcccaaacgcctgcaggaatcccagctcatgctcgaaaatctaagagaccgttataacccaagtgtggccatcaacagctatgatgacagaaaactcgccttgcaaaacgcaggctatgtcatcaatgcgattcaggttggaggatacaaaccgagcacagtcatcgatttcgagattcctaaacggtatgggttgcgccagacgatcgccgatacagtcggcatcggcgggatattcagatctctcagaacaatcccggtcttatttgatatcgcaaaagatatggaggaaatgtgccctgacgcatggttcttaaactatacaaatccaatggccactcttacaggcgccatgctccgctataccaatatcaaaacaatcgggctctgccacagtgttcaagtgtgcacgaaggatttatttaaagctctcggaatggagcatgacggaattgaggaacgcatcgcaggcattaatcatatggcttggcttttggaagtcaaaaaagacggcacagatttatatccagaaatcaaaaggagagcgaaagaaaaacaaaaaacaaagcatcatgatatggtgcggtttgaattaatggataagttcggctattatgtcacggaatcgtccgaacataacgcagagtatcacccatactttattaaacggaattaccctgaactgatcagcgagctgcaaatcccgctcgacgaatatccgagaaggtgcgtcaagcagattgaaaattgggagaaaatgcgggatgatatcgtcaataataaaaaccttacgcacgaacgctcaaaggaatatggttcaagaattatagaagcaatggaaacaaacgaaccattcaccttcggaggaaacgtcttgaatacagggctgatcaccaaccttccttcaaaagcggttgtggaagtgacatgcgtcgccgacagaaaaaaaattacaccgtgcttcgccggagaactgcctgagcagcttgccgccttaaaccggacgaatattaatacacagctgatgacaatcgaagcggctgtcacacggaaaaaagaagcggtttaccaagctgcaatgcttgatccgcatacaagcgcggagctttccatgaaggacatcatctccatgtgtgacgatttatttgcagcacacggcgattggcttccggcatacaaataaaaactaggggaccgctctcccctagttttttggttttgtttcgccttcccaggccatcatgccgccttcaacattgactgttttaaagccttgctcatccaggtacttgcagacgttcatgctgcgcattcctgagcggcagataaatacgtactctttgtctttatcaagggtttccattttttcaggaatatcccctatgcgaatatgaacggcttgcgggatcatgccttccgctacctcttcatcttctctgacatcaattaaatataattcttcgtccgcctcaattttttctttcaaagcggctgtgctgatttcttttatttccaaagaaaacactcctattcacagtgatcatgttcagtatatcaaagtcagctgaacgattgctattctgagactgatgaaaaaaatccccttttggcaaaggggattttttctaggcttagtttgccacaatattgacaagcttgccaggcaccgcgatgattttccgaatcgttttgccttcaagctgctctttgaccttttcatctgcttgagcaagctgttccagctgttctttcgttgcatcggcaggaacctgtaatttcgcttttacttttccgttcagctgaataacgatttcaacttcatcatccacaagttttgtttcatcatatacaggccaagcttcgtaggcaattgtgccggaatggccaagcttctcccaaagctcttccgctaagtgtggcgcgacaggagaaagaagcttcacgaagccttccatatattctttcggcagttctgttgctttataagcttcattaataaagaccatcagctgggaaatacccgtgttgaaacgaaggccttcataatggtctgtgactttcataaccgtttcatgatagacgcgctccaatgtttcacccgcgccttcaacgattttgtcattaagctcaccgctgtcttcaataaataggcgccatacacggtcaaggaaacggcgcgcaccgtctaatcctgattcagaccaggcgattgaagcatcaagaggtcccatgaacatttcgtacaatctcagcgtatcagcaccgtgagaggccacgatttcgtcaggattgacaacgttccctttagatttactcattttttcgttgttttcgccgagaatcattccttggttgtacagcttttggaacggttctttcgtcggcactacgccgatatcataaaggaacttatgccagaagcgggcatacagaaggtgaagcacggcatgttctgcaccgccgatatacatatcgaccggaagccatttttccaatttttctggtgatgccagctgatccggattgtgcggatcaatatagcgcaagaaataccagcagcttcccgcccattgcggcattgtattcgtttctcttcttccttttttccctgtctcagggtctgtgacttccacccactctttaatgttcgcaagcggtgattcgcccgttccgctcggtttgatttcatccgttttcggcaaaatcagcggcagctcctcttcagggacagctgttgacgttccgtcttcccaatgaatgaccggaatcggctcgccccaataacgctggcggctgaagagccagtcacgaagacggtatgtcactttcttctcaccgtttttcgtttcttccagccaagcgatcactttttcaatcgcttcctgtttgtgaaggccgttcaggaaatcagagttcacgtgctcgccgtcgccagtataggctgcttcctcaacgttccccccttttacgacttccttcaccggaaggccgaatgttttggcgaattcaaaatcacgctcatcgtgtccaggaactgccatgacagcacctgttccgtatgatgcaagaacataatccgcaatccaaatcggcagtttttctccgtttacaggattgatcgcatacgctcctgtaaatacgcctgtctttgttttcgcaagatctgtgcgttctaggtcactctttgattgaatttctttgatataagcttcaacagcttctttttgctctgccgttgtgatgttttccaccaatgcgtgttccggggcaaggacagtgtatgtagcgccaaacagcgtatctggtcttgttgtaaacaccgtaaaggaatcatcatgtccatctatagcaaaatgaacgtgagcgccttccgaacggccgatccagttgcgctgcatatctttaatgctttccggccaatcaagctcttccaagtcctcaaggagcctgtccgcataagcggtgattttcagcatccactgcttcattgggcgtctctctaccggatggccgccgcgttcgctcttgccgtcaatgacttcttcgttggcaagaacagtaccgagcgcagggcaccagtttacaggcacttcgtcaacgtaagcaaggcctttttcgtatagctttaagaaaatccattgcgtccatttatagtattcagggtcagtcgtattgatttcgcgatcccagtcatatgagaagccaagcgcttgaatttggcggcggaagttatcaatattctgcttcgtaaacacagcggggtcgttccctgtgtcaagcgcgtattgttcagctggcaggccgaatgcgtcccagcccattggatgaaggacatcatagccctgcatgcgcttcatgcgggacagaatatccgtagctgtgtatccttcaggatggccgacgtgcaacccagctccagacgggtaaggaaacatgtccagcgcgtagaatttttgtttttcattattatcaagagtggcaaatgttttgttttcaagccaatatgtttgccatttcttttctatctctttgtgctgaaaactcaaagtaaaaacctccttctgattgaatacggcgtgtatggttcaagtattgacgggaaggagaggattattcagaatattcccaaactaaaaaaaactccctcatccctaaaagggacgagagactttcgttttcccgcggtaccaccctcgttagcgcggcatacgccgcactcacttgatacttttaacgcagttatgcgtcagcggcttttcaccgctgcaactctgaggtgagttcggaaacaaacttgattgactttcaccagccgtcaactctctgcaacaatatctgtttcttactgctcctcttcattgttcttatcgcaaccgtaatctaactgtattttatagaattctgttcataagtgcaagcaggtttgtatacaatgggaatgtaccctgaacgggcggagattgaggacaattattcgggtggagttttggtttgacgtttggactcggccggttcgccgccgctgttcagttctctcacaaagtcaaaacttctgagaacagcttcaccgccgtagcctgagataatggataagatgacaagttgaattcctgaatcggggtcagcggataatacaagtaaaatggaagccgtcatgccgataaaccaatcttccaaaaatccaaggtagataaaccgcttcgtcattctgggcttctccagcctgcctctctttttcacatgaccgagaatccccatgattcctccaattacacaagcaatgagtacctgatgcagcatcttcatcatcaccttcctaaagcccttatttcgtaaagcgacttcaggccatccagcccccttaaacgattccgatgattttcgatatctacataccggcaaatctgtaaaaagcttgtttcttccattatatgtgaacacatgatcggtaagcttgatgcattggattcatttttcacccagtgacattgacctagtcacctatttagcatgtaaaaaacctttccgttcatatgttcaaattctgttcttatttttagtgtatacgaggacaagccctaatgacaaacaacaaactgcacttgcttgaatcagaacatgtgttgtgctacggttactgtagaattcattttaaaaaggggaatatcaggctttcgcatagcaagctgacggcctaagggggatttatatggctagttttcaatcatttgggataccaggacagctggaagtcatcaaaaaagcgcttgatcacgtgcgagtcggtgtggtaattacagatcccgcacttgaagataatcctattatctacgtaaatcaaggctttgttcaaatgaccggctacgagaccgaggaaattttaggaaagaactgccgcttcttacaggggaaacacacagatcctgcagaagtggacaacatcagaaccgctttacaaaataaagaaccggtcaccgttcagattcaaaactacaaaaaagacggaacgatgttctggaatgaattaaatattgatccaatggaaatagaggataaaacgtattttgtcggaattcagaaagacatcaccaagcaaaaagagtatgaaaagcttctcgaggattccctcacggaaattactgcactttcaactcctattgtcccgattcgcaatggcatttcggctcttccgctagtcggaaacctgacagaggagcgatttaattccatcgtttgcacattgacgaatatcttatcaacatccaaagatgattatttgatcattgatttatccggattggcccaagtgaacgaacaaacggccgaccaaattttcaagctgagccatttgctgaaattgaccggaactgagttaatcattaccggcattaagcctgaattggccatgaaaatgaataaactggatgccaatttttcgtcgctgaaaacatattcaaatgtaaaggatgccgttaaagtgcttccgattatgtaaaaagatcccgctcacccagcgggatctttcagattgttgacaaaatcctaaaatggttttcattttaggattttgtcatcttttcagcgtgattgaaaacccttgaagtctaggaaggacgagcataggagcggagcgaatgttctaattcgtgagcaccgaagcgcaggcctgacaacgaatgcgagggtttgtcgacacgctgaaagatcccgctcatccggcgggatcttttattatgaagagattgatgcctgcttatttgtttctttagctgattttatccgtttgtcatatagaagcgttgtggcaatactgatcagcagcaataccaacagagataaaacaagagccctaatgccgtaatgatcgacaagcactcctccgaacaggggaccaatcattctgccgcctgtcgccgcactgttgacaaagccttgataaaagccttctttccctttaggggcaagctgattggcaatagtcggcacagcaggccaaacaagcatttctccaatagtcaggatcaccatcgcagcgagaaacatcggaaattgctttgcagtcagcagcatgctgaaagacacaataaaaatgataaagccgatgaccatttgcgcttttagcgactcggcccattttttcaccacaaaactgacgagcggctggccgagcacaatgagaattccgttaaccgtccacagcacgctgtataaggaaagagatattccaatgctttgtgtgtacgaagcaattgtggttgaccactgagaataagccagccatccgagtacatagcctccgcttaaaatgatcagtgcggcaaattttgctttgctgttcacagcatcgtaatcaagcacagacgtttgggacgcatctcccgtctgaatatttcgaaatccgaaatatacaataaagaaaaagaccagatacagcgcggcattcgccaaaaatacatatgaaaacgagaaagacgccacgacaccgccaagcgctgaaccgacagccacacctgcgttttgcgcgacatatatcgcattaaatgccttccttcccccttcaggccataccgatcctgccattgcgtagctggccggaaaaacaacaccggagccaaagcccacaatcgtcagcagcacaatataggctggccaatcatgaaaaaagacaaggcccatcaggcttgctaacgtaatggctatcccaagcataatcgatttaaaaccgccgattttatcaaacaaaaaacctccgcataaattgccagccacactggcgccggaattcagcatcaggacaagtccggctactgttaacgactttcctaaatgattatggatataaatcgtattcagcggccataaaaaagaagcacccgtcacattgataaacattccaatgactaaaattttaagagcacgcggcatactcatccccctttcttacctaaaaaagctcatgaaaaaaacgaaacctaaaacggctccgtacgaatccagttatcatagcacattcattctatctgtctctctcacatttttcaactgatgagcgtgaaaaaatctaacaaatattgtttgaaaaatgtaaaataaatagaaaaagggggcatattatggaaatggcattagcattcttaggttttctggcatgtctcattgcactgggctatggattatatcactttgtcagatatgtactgaaaaaggaaaaacgtttctccaagagacttttttggccgcttttcattggaggccttgtgctgctctttaccggagcagcattggcagaacctgacacttccgcagcaaatgccgagaaaaaatattcagcgctaaacgccgaatacaaaaacctcacaaaagagcatgaagaacttgagaaagaatataaatctgtcagctctgaagcaaaaaaattaaaagacaacaaagaagatcaagacaagcttgagaagcttaaaaacgaaaatagcgatctaaaaaagactcagaaatcattaaaagctgagattaaagagcttcaagaaaatcaaaagcagctcaaagaagatgcaaaaacgacaaaggctgaaaatgaaacactccgacaagataaaacaaagcttgaaaatcaattaaaagagacggaaagccaaaccgccagttctcatgaagacactggaagttcttcaaacaatacgagtaaaagtgatgaaaccaaaacagctgacaaagcagaaggctgtaatatcaaaggaagcaaaaacggcatctaccacacgccaggcagtacatactatgaccggacaaccgatccggctgaaatgttttgctcagttgaagaagctgaagccgccggttatcgggcgccaaaacgataaacaaaaagctccagtatgtctggagctttttctgtttcacaacgacgatttaatgaccttcttataataaagaactgacagaaaaccaaaaatggagtagagcgcagtatataacaccatcaccataatcatgggcgcccatatctctgatccgaataagaaccagccggattggacggcaaagtaactgtggaagagcccgacaacgagcggaatgccgaagttatacatttgtttgatgcgtattccctttattaggtcgccctgcgtaaagccgagttttcttaaaatcgtatagctcggtttttcatcttcactttcacccatttgtttaaaataaaggatacaacctgatgtaatcaggaacgttaaccctaaaaagccgacgatgaacatcaccataccaaacagtgatttttgcgcagcgcttgtatccaatcttgataaatgctcgtttttcttgttcacctgttgaaaaagctcatttgctttttccatttgatcttcatgtttcacattgacgccgataaatgtagattgcgccagctgaattcgggggtctttatccttgttcagctgtttaaacaggctgtcatccacaatgacagcgggcatgcccccgcttgtaaacgtgtaggatacaagaaactcttctcttaatcctttatattttaatggctgcgtctcatgtttgctttttactttaataacaccagagtccttgaaaaccattattttttgcagcaagtcggtgtatcctgagaaaacggcttctccagccgccacatcgactccttttacatctttgtcgctaacaacagcaagctgcatattgctgggatcgccctgcatctctttcggagttccatccataatatttgcaatgtcaacatttgcttgcaggacaggtgttgccttttttacaaacgagatgttgctttccctcaatttgttttcaaataacttggcatctttctcattcatgaatgaaaaatcagccgctacattttgttcagcggtcttttccgacgagtaatacgagatgtaagcaagagataacagcccgatggcgagcgctgaaacggttgtaataatcgtcagcagcagcgcattcgatttcattctgaacatgatcgatgacagtgacagaacctcagaaatatttaagtagccgcccttgctttttcgaatgatattcgagataaacgtaactgatcctttataaaacaaaaacgtcccgataatgacgctccccagaatgaagctcatcgcaacaaacagttcattaatggtcttaaattttccgccaaacagctcagaagacacatagtatcctgtcaaaatcaacacgatgcctaaagcgccgatcagcatttggaaaaatgatattttcttcactttgtcttcagtggaggacgttactttaaacaaagataaaatactctgttttttgataaacgtataattcatgatcatgatcaaaaggtaaatgccgcagaacacaatgaccgtttggaccaaggcctgctcagaaaaatgcagtttcgcatccgctttgacatcgacaattttgaacagaatcatcaagacaagcttcgatatcgaaaacccggccgctaccccgatcgctaatgaaccgaaatacagcatgacattttctgcacttaagatgcgaaaaattttatgcttcgtcattccaattaattgaaacagcccgatttctttactccgtctcttaataaaaatcgtattggcatataaaatgaagatcgccactacagccacaagcaaaatcgaagcggttttaatagccgcggctcccttgattgaagccttcacttcgttaattgctggatcatactgcagcgtgacaaaggcgaaataaagcgccacgctaaagatgagcgcaaacacatacaaatagtaattccggagattctttttcaaatttcgcaggatgagctgattaatgttcatgctgcaccccgcctaacacgccttgcgttttcataatatcctggaaaaacgtttgcctgtcctggccccctttattcagctgtgtatacatttgcccgtccttaataaaaatgactctgccgcagtagctggcagcgacgggatcatgggtaaccataataatcgtcgcgttgcgtttttgattgagctggctcagcttatttaatagatcggaggccgatttcgaatcgagcgcgccggtcggttcatcagcgaaaataatgctcgggtcatgaataaacgctcttccagcggatgttctctgcttctggccgccggaaatttcattcgggtatttatcccgcaattcatatattcccagttcctttgcaacttcctcaaacttgcgattggcttccttttttgatagtttcgtgatcgataaaggcagaaggatattctctttcactgtcaatgtgtctaacaaattgtaatcctgaaagataaagcccaaatgctgttttctaaattcagccagctgcttttccttcatagccgtcatgtcatttccattaatatgaatggttccgtgactgacctgatcgattgaggacagaacgttgagcaaagtggtttttcccgacccggaagcacccataatactgacgaattcgcccttttcaatgtgaatatcgatgcccttcagcacttcctgtttattcagcttgtttccataactttttcgaattttattcgcttctaaaatcaccatttacgcagtctcctttatattggataatctcattataaaaaggaatgccgggcttttccttcgatacggcgaacaaaaaagaaaagcatgtgacattttcgtcacacgcttatgacatgttcaaattgattccgtattggaaaggttaatgtaaaaactgttcccgcaccaaactccgactcaacatcaatatggatcaataacggcgccgctgctttttttgccaagtacagccccatgccagttgacgcttgatcatggtgatccgttgtggatgtaaaccctttatcaaaaatacgcggtacatcttttggatcaatgcccctgccacagtccttcacttggagctgcgtctgttcccctttttgaaaacttttgatctcgatttcagaggcttcgctgtatttcaccgcgtttgtcagcagctgcctgatgataaacgccagccattttgcatcgctcagcacttctttggcctcgagctgtatgtcaaaaccgatccctttttggatacaccacgattgcaaatctttgatttctttaaagatcaaaggctgaagctgaatgaattctacagacagatcgttttcaataaatgatatccgtttttgatgaagctgctgatcaagaagcagatgaatacgcagccattcatatgacagctgggatttcagtgctttttcttccattctatcaatgattaaatgcatcgctgttaatggagttttgacctcatggatccatgccatcagctcatctttttcattttccaatgctaagcgatgccgtgctgcggtctgcttcaagtgttctgtttgcccggcaatgcttctttcaaccattgcttcaaacggcgtttccggttcatttatggctgtcacatcgagattgttctcccatgttttcaagcttttataaaacgctgtttctttccgatagcggaaccaaaggaatatgataaaaaacaaaatgcacaaatacaccatataaagtacattcccaaatgatatggaaggatcgacaaaaacaatgaacagcatcaaagcctgctgaaacaaaaaagcggcaatccagctccgcctttcgataaggaatgctttaatcatagaacttgtcctcttccttcgcgatgtagccctggcccacctttgtctcgatatatgcaccaagctgcagggcgtccagtttttttcgcaggcgattgacattgacggtcagcgtattatcactaacaaaacgctcatcgttccacaagcttctgatcagctcttcccggctgacgatcttgtttttttgctctattaattgttttagaatgaacatttcatttttggtcagttcaacagatcctttgtcattgctgacgaggttctgctccgcgtctacagcagcgccgcaccacgttttaatcgtattcggctccgtattataatggtgcacacgccggaacatcgcttggattttcgcaatcagcacatcaaaatgaaatggcttttggataaagtcatctgccccgagctgcatggacatcaccatatcagcaggatgatcccgggaggataaaaagagaatcggaacatttgaccgggagcggatcagccggcaccaatgaaagccgtcaaatttaggcagctgtacatcaataatgacacaatcaggattaaccgccgcaaattcctgcagcacctgactgaaatcctgaatgccgtatacatcataggaccatcccgttaaacgatccttgatttcatgaaacagcgattcatcatcttcaatcagcaaaagtttaaacaatcaactcaccgcactttttccttttttatcaagtgtatagcaaaacgctatcatgcgctatagaaaaagccggctgtctcagccggctcgttcgcattatagttctcttctcaacgctgtcagcacgttggtttttgttgcttttctcgccgggttcattccggaaatgactgcgacccctccgcaaatcacaacggcaatgatcacaagactcgccgggatgtaggagaatgtgtaattcaagtcgcccgcatcgcttccgcttgtggccgcaagaatcatcggaacggccaggttgacaaggtagctcacgccgtaagaaatgataatcccaatcacacagcctaaaattccgatatacgcgctttccatcaagaacattcggcgaatgattgacgggctcgccccaatcgctttcataatgccgatctcttgcgttctctctgtcaccgccatcgtcatcgtgttaaaaatgccgatcgctgaaatgataactgcgatacatccgacaaagatcagtccgattttgaagaccatgaagaaggtattggctccctcaagttcagtagtcactgatgtgacatagtacccgtcatctgttagatcatttgtcagctgttccacattctcaaacttatcagcaaaaacaccaatgttcgtttcaacatttccgcctttgaaatctaagaattccgaaaaatcttttttgaattgatcactgataaaaatgtttgagtcctccatccagtcttgagatggtttttttgtaataccgacaattttaaagtcatatgtttttgtttttgtaacatcccctgttttaggatctgtcttcgatacacttagttctattgttttgttcagaatatctttcgtatagccctttggttcttttatatcttctggatttccttttgcttcttcgatttttttgttatattcttccgattcttttttcgtcaataatctctttgcgaagtcgtatcctactacgatttcattttccgactttgcgactcttcccttttccaattccatattggcctttaattcatcattcatattagtaaaaatgagatttgagctttcatttgtacgattgcctaaagtagctttgtttggttcatacacttgcgttctttctacaactgaccttacgtgatcatacttctctaaatcagcttttttaataggcttgtctccttccttgcccattacactgactttcgttacaatctgctggctcattgtcatatctgtaattgtcttttgaatcccaaatccaacggacgacaacacaaccaaaaacgcacacgccattgttgtcgccagaatcgtcataaagacgcgaagcctgtttttcttcatatttcttctgataaaatgaacctgatccttaaacctcaacggtaattcctccttttagcacaccatcatgaagctgaaattttgaatgtccgatagaagcgacttcatcatcgtgagtaatgatcacaaatgtaatgccacgctcacgattcagctgctggatcaattccagcacttcatgttccgtttctgaatcaaggcttcccgtcggctcatccgctaagataatcgaaggatttaaaatcaatgctcgagcaatactgacacgctgctgctggccgcctgacagttcattcggataatgagcggcgtggttttccagaccgacgcgtttcagcatgtcctgcaccttttgcttccgctcagatggcttgattccttttaacgccagcggcatttccacattctcatacgtcgttaaacccgggatgagctgaaagctctgaaaaataaacccgaaatggtcaagccgaaattgcgcccattccttttcattaaaccccgtaacatcagtgccattaatgacaatccgcccttttgtcggcgatatgtagccggaaattaaattcaaaagcgttgatttccctgagccgcttcgtccgacaatgcaggcgatttcccctttcgccacgctcaatgaaacatccttcaatactggaacttcattctcacggcccttttttccgatcgtgaaagaatggtcgatatgctgaacatcaatcatatgttctctctcccttacaaaagtttcattttttataaatcgcaaaataactaatcaagaaaccgattaccgcacctgtacccatgccaatgagataaccggcaaagctctcgcttgcagtaaatccaaaatagccgaagcccatgattcctatgataataacgatgatctgcaccgggcggttaagcggcttccataagaagaaatatccgtttctttcattagacattttaacaaagctaatatagccgatgatgtaaaaaatgatagtcatgatagccggaatgactaaataatatggtgaattctcagcccatttcgagtctacataaattatcggaatgaaatactgcacccatttaggtactggaccatggataaaatctattgatccgccaaaaaggatctcgaggttgatcgcaggcaggctgatgagcaaaaatggcgaaatggccacggtaaatgagactagaagctgtgcgaaactattgcctgtcaaagctccacccgccataacaagcgaataagccagcatgctgacaatgatcattccaaggctgtaattgtgaaaataaacggcctgatcaggcttcaaaagtatgatcagcaaaacagataaaacataacctatgagctgcggtatcacaatcaccattccgccagtaaggaacttcgcatgaaatatctgccctcttgtatacggaaggcttaatgtaaaatcaaaaaagcccttgcttcgttcaatccctagctggctgaccgccaaaacgactccccaaatccaaaacaatgagataaatgagctgtttaaataatcaacgctgaatacgcaggggccgacccaattttcttttccagtgacacagccttgatagatgagatacatatttaaaattgataatggattacccaatataaaaaccaaaatggtgataactaaggcgactttattctgccgccactctttgtaaagcagtccggaatccggcaactcacttccctccaaacctatggcatttcttacacttttgttttcttataaatagagaagtagctcacaaagaatccagccactgccccaatgatcatacccaaaatataaccaataatggaatgtccggtatagtatccaaataaaccaaatccaaggatgccgaaagccataaccagaatttgcaccggacggtctaatctgttccataagaaaaagtgtccgtttcgttcacttggaagcttcttgaagcttataaagccaatcaagtaaaatagcatgctcattacggctggaatcaataaaagatatttactgttaatcagccattcatttacaacgtaactaatcggtactaggttcgataaattgcttgccagagagaaataactctcaggggaagggaatatttcccatatattcgcaccaaaaacaacttctaggtttccaaccggcaatgcaataattaaatacggcaatatagctgctgaaaacgccgttaacagttgggcaaaagcatttccagttaacgctccggcggccatcaccagtgaaaaagccataaaacttatcacgattactccaatgctgctgtgctcaaaaaagtagacgtgttcagggttatagacaagaatcagcagccatgcaagtaaaaagccaatcaattgtgacagcacaatcacaaaaccgcctaaccaaaattttgtctgaaaaatttggcttctgttatacgggaggcttaatataaaatccatcgtgcctttcgaacgctccattccgaggaagcagaccgccaaaatgacacccggcacccagttgatatctatcagattgcttatggaataattcacaataaaatcacaatattgcgggtcttggcgatcaagacacccttgataagacaaatacgtattaacgatagaaagcggatttgccaatactaaaaacgcgatacttaacaaaatcaccacttgattctgcttccactctcgatagaggagacctcggtctaccatctccgcttccctccaaacttcgcaatgaacacttcttccaggttgacaggaagctcattccacacttttggcttcagctctctcaaaaagctctttttctcctcatcgcttttcggaatcagcactgtgtaaaacacgccggcctgatcgagcatcggaatgttttgctctctgatggccaaattgacatctgtatcgaaggccatttgaattttaatgtattcttcttttaactcatcaagatccatgacgttggtcaggctgttatcttcaagaaaaccaattcggttgcacatccgctctatgtcttcaagccggtgggacgtaatcaggatgctcgtatcacgctctgccacttcatcgaccatcagctgcagcacatcatgccttgtcaccgcatcaataccatccgtcggctcatcaaggaggatcagcgccggtctcgccgcaaacgacagaacgagcgatagctgcttttttaagcctgtcgacagctcacggtattttttcgtttccggaatttcgtatctgttcatcagctcattcgcgtacgtgacatcaaatttcggatatattcttctcaaaatatcgactaactgcttgtatgtatacttatcgtaaaacggattttgaacaggcatgtagatgatattttgtttgactttcgggtgctttttgatttctacgccgtcaaataaaatcgttccgctgtcagcgaaaatgatttgctggattaagcgaagcatcgtcgttttgcccgatccattgcgtccaagcaatccaaagatttctcctttttcgattgttaatgaaacatcttttaatacttgattgccgtcaatcgcttttgacagctgccgcagttcaatcattttttttgcctcccttcacatcagcgctgatttcctttatccattcgtgcagtttttccagctcaacccctgcatagtgtgcatcgatgatgagctgtttgagttgctctttaatcatcgtcatcttcccttcaaccagtgtcgtttttgcattctccgatatataggtccctctgccccgcagcgtttcaataatcccctctcgctcaagttctttatacgctttgctgacagtgttcggattcgcaataatgatcgttgccaattctctgacagaaggaagcttatcaccaggcttcatgatccctttcaaacaaagctctttcatttgctgaataatttgttcgtaaatgggtgttgagcttcttggatcgatttgaatcatttacttccctactttctatacgatctgaaccttttatagataaaaatgatcaattatacttttttgccattcaaaaccgatcatcacaagaacaagaaaaaaagaacaagcgatcacagatgccgcaatcagcattggcacgttacgtttgtttcgttttttatgtttcataactgcctcccttaatgtcaatatataaatgattttatattagtgtctatagtgtattacttcaattagtacacttaatacaataaatactttgactcacaaagtcaatcctttttttacaaaaaaacggacccttttaaaagggtccgttttcctacacatcaagagggtgctgcaggatcatattattttgcaaagattgaagctgaagtctcattctgtacagctgttctctctgctgatcatttgacgacagccatagtttattcaaggcatttaccgcatcttctagctgcatttgtgcatcactatattcttgatcgttataatgctcttgtttagaagcgattttcagctgttcttcagcataatcataggcctgcatacattgctggagatgttcatctactgattgtcttgttgccacagtaacccctcctcttggtaatggaaatcatccatcattcatattgtagcctcatctgactttattcaataaagtaatttatggtcgatattcatttgttctcttgtgaaatgcgtgctacaattttaggatgcaatcgtacgcaaggaggcacatgaattgtgatacagaacaatccttttccttattcaaatacggaaaaacgctatcatacattgaattatcatctcagagatcatttcggccataaggtgtttaaagtggcgcttgacggcggctttgactgcccaaatcgggatggcaccgttgcccacggaggctgtacgttttgcagcgcagcaggctccggcgattttgccgggaaccgggccgatgatttaattacgcaattccacgacatcaaaaaccgcatgcacgaaaaatggaaggacggcaaatacatcgcttattttcaggctttcacaaacactcacgccccggttggggtgcttcgcgaaaaattcgaatcagtgctagcgcttgatgatgtggttggcatttcgatcgccactcgcccggactgtctgcctgatgatgtcgttgattacctggcagagctgaatgaacgcacctatttgtgggtggagcttgggcttcaaacagttcatgaacggactgcacttctgatcaaccgcgcacatgattttaactgctatgtggaaggcgtcaataaattaagaaaacacggcatacgtgtctgctcgcatattatcaatgggctgcctttggaagaccgggacatgatgatggaaacggcaaaggccgtcgcagatttggatgtccagggcattaaaatccatctgcttcacctactgaaaggcacgccaatggtcaagcaatatgaaaaggggaagctggaatttctttctcaagatgattatgtgcagctcgtctgcgatcagcttgagatcattccgcctgaaatgatcgtccaccgcattacaggtgacggaccgattgagttgatgatcgggccaatgtggagcgtcaacaaatgggaagtgcttggcgccattaataaagagctagaaaatcgaggcagctatcaaggaaagttctttcagcggcttgaggaggaatcagcgctatgattttgaagaaaattcttccctacagcaaagaactgctgaaaatggccgcgggagaaggagatattgtcgtagatgcgacaatgggcaacggacatgatacacagtttttagcggagcttgttggtgaaaacggtcatgtgtacgcattcgacatccaagaatcagccgtggccaatacaaaggaacggctcggtgacatgtatcaagcgcgaacaacgttatttcacaaaagccatgataaaatcgctgaatccctcccgcctgaaacacatggcaaagtggcggccgcggtatttaacctcggctatttgccgggcggggacaagtcaattacgacaaacggcagttctacgatcaaagcaattgaacagcttctcggcatcatgaaagacgaaggtctgattgttctcgtcgtctatcatggccacccggaaggcaaagctgaaaaaaacgacgtgctcgagttttgccgggacttggaccagcaaacagcccgtgtattatcatacggatttatcaatcagcaaaatgacccgccatttattatcgccatcgaaaaaaaagctcagatcagcaaatgatttgagcttttttctttgagtttttcatccagaacattttttgaaatttccggtaggctctgccgttgatataaaagaaaagggaggtttttccgctggctttgatcagcttctttgcgagccggcccatttccttttggcccgccactttatcatctgacaaataaacgccaagcaagccgcgattgattaaacgatggaagttttcatgcggaatgccttgtaaatgctcgtcagctttatggataaagtgttcaagccgattcatcatctcttcatgagactgataatacgagcagaaattcaagtctccttccagcaagtcctcctcttgatcaatcaaataatcaagaagaatatgaaggccctgtatgtaaggaaaataactgtcgcggatttttttagcggtgctttctgtgaaatcaggctggaacgaatacgcaaccagacagaaaatgcctaacgttgagcctgcacaggctgaaaattcataccattccatctcaggcagctctgattcatattgagtaaaccacttttcaagccgcggaacacgctcatgctcaataacgtgcttatgcacctgcaaatcgcaataatagccgcacagttcaagcagataaggtttaatcatgtcatagtgctcaatggagccgagaacacgctggcacgttttgaccagttcatgcaaatatccgctgtcatcctgttcttccctgaattgataatagttttgcagttccgccccaactgtcagtgcgtcctgcattgaggcatggagcatccgaaaatcctgcgggtccagcgaggtgctgcggtcacacagattgtccaaataatcactaatcgtttgatacgcgatgataaactcgacacatttctgtttttggctgcctgacaataaggccagtatgccgccgccttcacagtgaaacgttttgtcccgaatacttgcggttgcctgtgctttcaattcactgttatgaatcgattctgatttttgcttccatatgtccagctcttgatgaacgagcggaaaaatatctcgatatacctttgccatcaatccaaaaggatgttccggtactgtcaacacatgcaccccctactagttcaaatatattgatcagtaaacgctcttgctgctttaaaaacatcttctctctcgggttcattgaagatctcatggtaaagcccttcccactctctgtatgctttattataagaagcaacaccattaaaccacttgatgaccatcgttttgtcaacaagcttgtcatcaccggcttgcatcacaagaagcggaactttcaaaaatgcctctgtcggcaccattgccgattcaattgtctttaaaagctctctgtaccatctgacagaaactttcctgacgtataacgaatcattttggtcagcctcaatgacgtcctcattgcgcgtcgccatatcaattgataatcccgaatcaaccttaagtgacggagcgatgacattcaggccttttgatgcaagatcaagcgctttattcactttaatttgcagtccgagacacggtgatgataaaataattcccgtaatcttgggatttctttgctgtttaatccattcaatcgcgaccagaccgcccatgctgtgacctagaagaaaaaccggcagatcaaaggttcgcgctttatctatccaagcatctacttcatcaatgtattcttgaaacgagcgaatatgccctctcgctcttgtcgttgttccctgtccaggcaaatcgcccatgacaacgtgataacccgaagaccgccacatttcaatcagccatttatatcgtccatgatattcacttgccccgtgaatgattacaatcacggcaacaggtctgtctgctttccaggtccacatgatcttcacctcatacgaaatttaaatagagaaagaaggatgaatcttatgatctacccttataaggaacacaagccagatatccacccaacagcctttatagctgataatgcaacaattaccggtgatgtcgttatcggagaacagtccagtatttggttttctgttgtcataaggggagatgttgcgccgaccagaatcggaaacagagtcaatatccaggatttaagctgcctccatcaaagcccgaacaagacgctgctcattgaagatgacgccacgataggccatcaggttacacttcatagcgctgttatccgcaagaacgccttaatcggcatgggctcaatcattttagacggagccgaaattggcgaaggcgcttttattggtgccggcagtcttgtcccgcccggaaaaatcattccgcctggccatctcgcctttggccgccctgcaaaagtcatccgccctttgacggaagaagaccgaaaagatatgcaaagaatacggtcagaatatgtagaaaagggccaatattataaatttcttcaacaaacataagacctgcttcgtcttactttaccatttttcaaattatatttgaaagcaataaccatcgttaacccggacgtcataacagttcgggtttcgatttttccataaaacgttcacatatagcatgaaacgtatgacttttatcttatcacaaaactataaacagcctctgcaaaaacacatacctattctttcctgttctctattttctatgagcacacacaaaaagagcccactgggagctctttttgtcagctgatatttcgttcgctggcagctgctgcattttttttgtgaaacccttttccatagtacacagccagcaagatgagaaaccatatcggcccgataatcacggctactcttgtatcaggactgtaagccataagaatgacaacgaatgctagaaatgccaatgacacataagacgtaaacggaaataaaggcattttgtactttaattgtttcttttcttcaggcttcaaacttttcctgtattttatttgagaaagcaaaatgattgcccacgtccaaatcgctccgaacgtcgcaatacttgtaacccaagtaaataccttcgcagggacaacatagtttaacagcactccgactaataaagcgcccgctgaagccagaacagctttacccgggatgccgcctttcgtcagctgaccatatgcttgtggcgcctctttctgttccgccaagttaaacagcatccgccctgtgctgaaaataccgctgttgcatgaagacagcgcggctgtcaacacgacaaagttaatgatacctgcggccgatggaatgcccactttttgaaatgtgagaacaaatggacttccttgagagccaatttcctgccacggataaatagacataatgacaaataaagcgcctacataaaaaatcaaaatccgccaaaatactgtatcgattgctttggctaacgatttttgcgggttttttacttcgccagccgtcaccccgatcatttcaatccctaaataggcgaacatgaccatttgaagagacaatagaaccccttttaaaccatgagggaaaaatcctccgttgttccacaaattgctgattccggttgcaatgcccccattgccgactcctgcaataatcatcaataaaccgacagcaatcatggataagatcgcaacaattttaatcaatgcgaaccaaaattccagctcaccgtaagctttgacagccaggaaattaacacccgtcataatgaccagtgccgataatgcccaaatccagtttggcacgtcaggaaaccagaaccccatatagatgccgacagcagtaatttcggccatacaggtgacaacccataaaaaccagtagttccaccctgttaaatagcctgcaagcggtcccaaataatcacgcgcatacctgctgaaggagcctgcgaccggtttttgaatggccatttccccaagcgctctcataataaaaaacatgaccaggccgcttgcggcatacgctaccaaaataccaggccctgctaattgaatagctgatgcggagccgaggaacaaccctactcctattgcagctcctaaagacattaaagaaatatgcctttcttcgagtccgcggtgcagctcttgtttttgtttttgcatgctttcttctcccctagaaaaaaattcattaaatcatttttctgaatatttcgtatgaattgggtaaaccaatgatgatggagaaataaaaggataacaacaaggctttcgactactcgaaagccttgttgtctgttacacaaagatgacttctttaggctgatggctcagctcttcaggcatataccgtttttcaatattgatgctgtgccagatcataaagattagcacagtccagattttacggctgttatcagccttgtccgcacaatggtcttcaagaagctgaaggacataatccttatggatataagcatccgtttggctttcctgaataatattccgcacccattcgttcatttcgtttttcagccaatgacggatcggtacagggaaaccaagctttttgcggtttaatacgtgctcaggcacaattccttcagcggctttgcgaagaagatacttcgtcgtgccgttcttcgttttcagctcatcaggaatttttgaagcgacgtcgaatacgactttatccaagaacggcacacgcagttccaaagaattcgccatcgtcattttatccgcctttaacaaaatgtcgccgcgcatccaagtgtggatatcgacatactgcattttgttgatatcgctgtacgagctgctttctgtaaagtaagtcttcgtcacatcgcgatatgaaaggttcggattataatgcttcaacagctgctttttgacagactcttcaaagattttagcgttaccgatataacgatcctgaagcggagtgcagccgcgctcaagcaggctcttccctctcataccttcaggcataacggcagcaacgtgcagaagcatctttttcaagccggacggaatccgttcaaacggtttaagcgaaagcggttcacggtaaatgttatatccgccgaagagctcatccgctccttcacctgataaagcaaccgttacatgttttttcgcttcttttgcaacaaagtacaacggaatcgctgccggatcagcaagcgggtcatcaaaatgccatacgatcttcggaagctcattcatgtattcctcaggcgaaatgactttgctgatattttcaatgcccagcgccgctgccgtttctttcgctacatcaacctcactgaagccctgctgttcaaagccgacagagaatgtttttaagcttggatgaaattccttcgcaacagacacaataaaggaagaatcaatcccgccagacaggaacgaaccgacaggaacgtcacttctcatatgaacgtttacagagtcatagatcgcgtctcggacttctttcacaagcttgtcttcttcagtctgaaccggcttgaagttcgctttgaaatacgttttgaatgtgatatcgccgtccgggcggattgtgaactgtgaacccggctctacttttttcacatgggcatcaagcgtgcttggttcaggaacaaattggaaagacatgtactgctgcaatgcctctttatctatttcaatatcattctgagcaaccattaaactttttctctctgaggcaaaataaacctgatcattgatcgttgtgtagtacaacggtttaatgccgaatggatctcttgccccataaagcacatgatcgtttttattccaaatcagaaaggcaaacataccgcgcagtttggacgccgcttcttctttatagtgacagtaagtcgcaagaagaacctctgtgtccgaatccgtgttgaatgtgtacccctttgcttcaagctcttctctcagttcaatatagttatagatttctccgttaaagataatccaatatgtttcatcttcatatgataaaggctgtccgccattttctacatcaataatgctgagccgtctgaatccgaagccgacgtgctcatcatggaaatatccatcactgtcaggaccgcggtgaacgatcatttggttcatttgtttgattagttcttcttgatcagcggtttgagctaacggatgcttgttaaaaaccccgacaaatccacacatagtattgcctccataattaaaattgtcatcattgaacccctatttatagacgctgtgaataatatttggtttcacagttatgtaaaaaaataaacatgaatacaacgataaaaaagggaaagccgcttaaccagtaagcggctataaaattattctcctaacgcttctttacgcagctgctccgctttgtctgtacgctcccaaggaaggtcaacatcgtgacgtccaaagtggccgtacgcagcagtttgtttgtagatcggacggcgcaaatcaagcattttgataatgccggcaggtcgtaaatcaaagttattgcgaacaacttcaatcagtttttcctcagaagcttttcctgaaccgaatgtgttgattgagattgacacaggctgtgcaacaccgatcgcgtaagcaagctgtacttcgcaagaatcagcaagctcagccgcaacgatgtttttcgcaacgtatcttgccgcataagctgcagaacggtctaccttcgtcgcgtccttacctgagaacgcgcctccgccgtggcgtgcatagccgccgtacgtatcaacgatgattttgcgtcctgtaagtcccgcatccccttgagggcctccgattacgaaacgtcctgtagggttgatgaaatattttgtttcttcatcaatcagctcttcaggaacaaccggattgattacatgttctttaatgttgcgctgaatttgctcaagtgtaatttcagggtgatgctgagttgaaataacaatcgcgtcaatgcggactggtttgttattttcatcgtactcaaccgttacctgtgttttgccgtcagggcgaaggtacggaagaatatcttctttacggacttcacttaggcggcgggctaatttatgggcaagtgaaattggaagaggcataagctctttcgtttcgttgcacgcataaccgaacattaatccttggtcacccgcaccaatcgcttcaatttcttcgtcgctcattgtgccttcacgggcttcaagcgcttggtctacgcccatcgcgatatcagcagactgctcatcaattgatgttaaaaccgcacaagtttccgcatcaaatccgtattttgcacgtgtgtatccgatttctttaatggtttggcgaaccgttttcggaatgtcaacatacgtagaagttgtgatctctccgcttacaagaaccaaacctgttgtcacagatgtttcacaagcaacacgcgcgttagggtctttctttaaaatttcatctaaaatgctgtcagaaatctggtcacagattttatccggatgcccctccgtaacagattctgatgtaaataaacgacgatttttactcatgatttgcttcctcctgcacaaggcctcccgaaagaccttgtatatatgatacggaactcgctccctcttatacaatgtacagttatattagagaatgttaattggcatatttatgaaataaaaaaaccttttccatcgaggaaagggtttggtctttgtgcctttcactcttatcgctcaaggaatcatacaaccttgcaacaggttagcaccttggttgtctcactcagttgaacataataaataacagagaaaccggttgctgggcttcatagggcctgtccctccgccagctcgggataagagtatccgctcaatgaaatatcttatcgtaaaagggtttgcaatgtcaatatgattcagaagaaataggcacctatattgagggaaaacaatggaaatgcacacacaaaaaacaataaatagtatagactatttgaaaatatatgttatactaattcacaattagcaaaacacaaaaaacgataaaggaaggtttcatatgaactcagttgatttgaccgctgatttacaagccttattaacatgtccaaatgtgcgtcataatttatcagcagcacagctaacagaaaaagtcctctcccgaaacgaaggcattttaacatccacaggtgctgttcgcgcgacaacaggcgcttacacaggacgctcacctaaagataaattcatcgtggaggaagaaagcacgaaaaataagatcgattggggcccggtgaatcagccgatttcagaggaagcgtttgagcggctgtacacgaaagttgtcagctatttaaaggagcgagatgaactgtttgttttcgaaggatttgccggagcagacgagaaatacaggctgccgatcactgtcgtaaatgagttcgcatggcacaatttatttgcgcggcagctgtttatccgtccggaaggaaatgataagaaaacagttgagcagccgttcaccattctttctgctccgcacttcaaagcggatccaaaaacagacggcactcattccgaaacgtttattattgtctctttcgaaaagcggacgatcttaatcggcggaactgagtatgccggtgaaatgaagaagtccattttctccattatgaatttcctgctgcctgaaagagatattttatctatgcactgctccgccaatgtcggtgaaaaaggcgatgtcgcccttttcttcggactgtcaggaacaggcaagaccaccttgtcggcagatgctgaccgcaagctgatcggtgacgatgaacatggctggtctgatacaggcgtctttaatattgaaggcggatgctacgctaagtgcattcatttaagcgaggaaaaggaaccgcaaatctttaacgcgatccgtttcgggtctgttctcgaaaatgtcgttgttgacgaagatacacgcgaagccaattatgatgattccttctatactgaaaacacgcgggcagcttacccgattcatatgattgacaacatcgtgactccaagcatggccggccatccgtcagcaattgtatttttgacggctgatgccttcggagtcctgccgccgatcagcaaactaacgaaggagcaggccatgtaccatttcttgagcggttacacgagtaagcttgccggaaccgaacgtggtgtaacgtctcctgaaacgactttctctacatgcttcggctcacctttcctgccgcttcctgctcacgtctatgctgaaatgctcggcaaaaagatcgatgaacacggcgcagacgttttcttagtcaataccggctggaccgggggcggctacggcacaggcgaacgaatgaagctttcttacactagagcaatggtcaaagcagcgattgaaggcaaattagaggatgctgaaatgataacagacgatattttcggcctgcacattccggcacatgttcctggcgttcctgatcatattcttcagcctgaaaacacgtggaccaacaaggaagaatacaaagaaaaagcagtctaccttgcaaatgaattcaaagagaactttaaaaagttcgcacataccgatgccatcgcccaggcaggcggccctctcgtataaaaaacaaaagccaagagcaattatgctcttggcttgttttaattgacggaatgcaaagaagtcagcttgtatgtaatgatggtccggccttcttcccattgaagcttctgcacttcagctgtgcctgacttttcgccaaactttgttttgcgtacatccattggaatctccatcggatatactcggtatccgtccttctctaacgtgaatatattttcatctatgcgaacttcttttccttttgtcacaatcagtgtattaaattcaacaggcattcccaaagtgaaatcccctttcgttctcttttttctttatcataacatatttcactgtcagcggtttttcatccattgtgtgagctgccgcacgatacgccggttttcttttggcgggaaataatgtgtgaatgtactgtagtaccacgtctccaccggcttatgcagttgttttagcttctcttcaaataaataggaatgctgaattgaaacattttggtctttttctccatggattaacagcacgggagcctgaattttgtttacttggtcaaacggtgtcctccattgatattcctcaggcacctttttcggtgttccgccgatgactcttttcatcattcgccgcaaatcctgccgctcctcgtatgtaagaatcatatcactgacgcctccccaggaaacaaatgaagctgcctgcccgcccatttcgatcgcagtgagcattcccataattccgccgcgggaaaaaccgaagatgtggattctatccttcttgacatttgggtgctgctgaagcaggcgaaaagcagaaaatgcatcctccctgtcttctcctgcaaaatcctcattgccttctcctccttgatttcctctgtaaaaaggagcaaacaccacaaacccttgggatgcaaactggataatccggcccggccgaaccatgcccacgcttttaatcccgccgcgcaaatataaaaatccgtcatattgtcccggttccgccggctcagccagaagccccttaacccgtaatccatttgacagatagcagatcgtatacaaacgcacatgctggcttggcgacggaaatcttcttttctctacaatcaaaacagccgcctcctttttttctatatgctttccttactccaaaattacatccggagaacctggttaggcattcacacatttttatac

SEQ ID NO: 4 - DNA, 1089676 bp, Bacillus subtilis
  source 1..1089676: mol_type = genomic DNA; strain = Strain 105 ELA191105 ATCC PTA 126786
ccatcatacgatatgtaaagcaaaaaaggatattaacttgatgcgaaataaggaggttgtctatgtgaacagatggttaaggctgagcttcgcctgtgtcggcagtatctttctgatgttcgccctggcggcttgcaagcaggaagaaacgctcacaaaagtcaaggtcgctgaagtgacccattcaattttttacgcacctttatatgttgctgagtctaaagggttttttaaagaagaagggcttgatgtcgatgtgaatacgacctggggcggagataaaacgatgacatcgcttctttccaacggctccgacatcgcgcttgtcgggtcagaaacatctatttatgtcgaagcgcaaggggctaaagatcccgtcattaatttcgcccagctgactcagacagacggaacgtttcttgtcgcgagagaagatgttgaacacttcgactgggatcagctgaaaggaaaaacgtttctcggtcagcgaaaaggcggcatgccgcaaatggtcggcgagtatgtactgaacaaacataagattgacccgcgtaaggatatagacctcatccagaacatagacttcgccaatattgccaatgcgtttgcttctggaaccggtgagtatgtacagctctttgaaccgcaggcttctctctttgagaaaaaaggcatcggccatatcgtggcttcattcggagaagaatcaggagaggttccttatacgacttttatggcgaaacaaagctatttgaagaaaaatgaagacacagccgtcaagtttacaaaggccatttataaggcgcagcagtgggttgaaaatcattctgcgaaggacatcacagatgccattaaagatgaatttgatgataccgacccagacgtcatcgaaacatccattgaacgctataaaaaacagcattcatattcgccagaccctctgcttaacgaaaaagaatgggagcttctccaaaccattatggatcaatcgggagaactgccgaagcacattccatacaatcagcttgtaaataaagaaattgctgaaaaagtcacctcggagaaataggaggcgccatctatgtctttcttacatgtcgaccatgtaacccatacttatttttctattaaagaaaaaacaacggctgtgcgggatattcatttcgatgccgaaaaaggcgatttcatctcatttctcggcccaagcggctgcggaaaaacaacactgctttccattattgccggtttgattgagccatcagaaggcagagttctgattgaaggccgtgagccgaatcaaaaagaacataatattggctatatgcttcagcaggattacttatttccctggaaatctatcgaggaaaatgtgcttctcggtttaaaaatcgccgacacgctgacagaagaaagcaaagccgctgcactcggtctattgccggagttcggcctcatagatgtggagaaaaaatatccgaaagagctgtcaggcgggatgcgccagcgggctgcgcttgcaagaacacttgcgcctaaccctagtctgcttttgctggatgagccattttccgcgcttgattttcagacaaagctgtctttggaaaacctggtattccgcacattaaaggaatatcaaaaaacagcagtgcttgtcactcatgatataggggaagcgatagcgatgagcgatacgatctttttattttcaaatcagccgggcaccatccatcagatttttaccattcctaaggaattggccgcaatgttgccttttgacgcccgtcaggaaccttccttccagacactgtttcaaacgatatggaaggagctgaattctcttgagaaacagcaaagaaaccattgatctgcttcacgagcagtatcaattcaaacagaaaaaggaaaagtggaaggtccattcctttcagcttgccatatttattctctttttctcgggctgggaaacctccagcaggcagggctggatcgatccgctgatcttcagctctccatcagctgtgtggcgattattgctggagaaacttggtgacggttctttactgtcacacatcggcgtcactttatttgaaacggtgcttggctttttgcttgggacgtttatgggcacgtgcctcgccgctttgttatggtggtctaaccgacttgccagaattttagatccgtaccttgtgattttgaatgcaatgccgaaagtagccctgggcccgatcctgattgtcgcgctcggtcccagttttatcagcatcattgcgatgggagccatcatcagcgtcattatcacaaccatcgttgtctataccgccttccaggaggtcgacgaaaactatacgaaagtcatgaaaacattcggcgcaaaaaagtgggttatttttaaagaagtcatactgcctgcatcctcccccgcgattatttcaacactaaaagtgaacgtcggtttatcatgggttggcgtcattgtaggggaattcctcgtttcgaaggtcggattaggatatatgattatttacggattccaagtcttcaattttacactcgtcttcttaagcctgctgatcatcgccatcttcgccactctgatgtatcagggcgtcgagctgctggaaaagaaatggacgaaggggaggacataaaaaacccggcacatgtgccgggttttttattcaatccatccagattctttcagttttttcaaactgatcggaagtacggaatccttcataataaagctgaattttttattgcgggaaaggttctccggaagctcgtgaaacaaaaccgggcctttcgtttcaaagtaatcagcttgcttttcaagcttttctatatctgcaaaatatatatttttcacaatcactttttcttttccgagaactttatactgtccgagatacttgaggcttttgactctcgcgcccgtctcttcctttacttcccggagcgcagcctcttctgcgcactccatcggctctactttcccgcctggaaactcatagcctctgtcctcatgttctgttaaaagccatttgccgccaaaacggcaaatcacccagacatgcttcgggctgtccgagaaaggctgatcgtcaaaggaaagctgaacagtattctgataataatctttaaactcgtacatgtttatccctcaaatccgttcctagctatcttccatacatcataccacagttacgtttcttcggaagccttttatcaaaaaataagggaaacccagcacgccgtcaggttctgcatgcagactagctcgtacagtttttttgcgatagcttttgccgaaaagtgcgaccgacgctctgggctttattatgacccgcgaacagggaaaagttacggtttgcgcttaaatttattttttaacgtttctaaaagatcgacaagcatctgaggaaccggtatgccaagagaactggctgtcacaacaatttgcacagattcataaagaatataaaacataatagccaagtcacgaattgatccctctgtattcagcagctgatcaaaaaagtggcatacagagatcagagccagcgtgactaattttttgacaagccgggcaaatacctttttaaatgacagtttgtgaataatggtttccttcaaagtcgtactgataaattcaattgccataagagagagcaaaatcagaaatgaatactgaaaacctccaaagaaaaaacccgctgctgaaacgctgactgctattaacgaaaagatgccaaagtctctatccatttatcccaacatcctttcacagaaacggccttacgatattctatggaaaacaagccgaacggattggatttttcagaaaaatggactggttgtcgcctatttttcagatacaaaaagaaaagccggacgtcttttttaagacatccggccgttctttttttggacttaacctaggtaagcttttagcatccagttatgtttttcaatattttgatggatcgcaagaagcatgtcccctgttgtttcgtcaccgacttcatcagctaaatccatgccgtttttcagctcttccgcgatgactgtgaaatcatcatatacgctttgaaccatttgttcagctgtttcatttccagccgcttctttgacagaagccgtttctaaggattccttcattgttgcaatcggttttccgttcagcgccaaaagacgttctgctaagtcatcaatataagttgccgtttcgttgtacagctcctcaaacttttcatgaagagtgaagaaatcttttcctttcacataccagtgatagttatgtagtttcacatacatgaccgtccagttggctacttgtttgttcactgcttgaatcaattgttctgacatggtatctcctccttgttatatgactatgtatacccttaatatcgtacgctaaaacctcttttttacccttatctgtcacgatttcttctattatgctacaattgttaaaaaacgggaggtggaatgtcatgacgcttctcattacgataagtattttgattgtgctggctgttttgcttgtaaccatttggacgactgtaaaagcctataatgtaaagcataccattgatccaccacaagaaaatcactctgattcacacaatcaatgatgatgtgaatgttcctcttctgactgattgctggcagcatcggcgtctccgacttggacttttaaggtcggcatgctatgctgtttttttgctgtgacatgggattggacagtgtatacaccatcttccttaaacgtcgtttccaatcggtatacgcctttttcttgtttcgccttaaacatttggcttgcgtctttttccccttctttccatacttcaaactctacttcatcggcatccgtcacagcttcatcaccatatgatacggctgcttcataagcagcgctttctccgggatttactttttcaggcccggtcagcttgacatccaaaacctcgggcgtctcagctgtatttgctttgctttcaccagatccgcatccattaagcaataaagcagaaaaaagcagaacaaccaacatctttttcatgccatcaccctttcatcgtttacctaaatagtagcaaacgcttacagcaaatggtacataaaatatgagacgtcacaaaaaagacctttttgcttatgcgcaaaaaggtcctttctattttagccaaatacttttagcaattcttctttatcctgtgaaagccagaaacgcattaaacgtttagcgccttccagatcatgaagcttcgcttggccgcactgcttttcattcgcagctggtatttctgtaatctctaccgcttccttcattgtgtcttcaagtagatcaacgatttccgctgatgtcggctctccgctcacaactagataatagcctgtctggcagcccattggagaaatatcaatgatatcaaaatgatcgtatttctcagcgtgagaacgaatcgtaaacgcgagcaaatgctcgagtgtgtgaatggtgtcaggcttcatcgcctgtttatttggctggcaaaaacgaatgtcaaatttatttacaacgccgtctgttcctactttatgcacgccgcaatgtcttacatatggagcaacaaccgcattatgatcaagctcaaaactttctactgaaggcataatggcactctccccttttttaaaaatgtaatttcattataacatacttttccgataagaattattgattaacttttcaatctgtgttttttttcttatacttgcatcagaaaggttgctgaagaaacatgaaaaccctattcatcgctctgatcagaggatatcaaaaattcatctcgcccctgacaccgccaacgtgccgcttttatccgacctgttcccaatatggaatcgaagcgattaaaacacatggcgctttaaaaggcggatggctgacaatcaaacggattttgaaatgccacccgttccatccgggaggagtcgatcccgttcctgaaaagaaacaaaaacattaattgttataaccgtttacgataagatccagttttccggttttaggatcaatgactaagccatggaccggaacgttttcagggaacagcgggtgatgtttaataacgtctacgctgtctttcacactcgcttccactgaatcaaagcttttaaaccattgatcaaagtctacaccggagtactttattgtttcgatgcgttcttccggaatccctcttgctttgattttttcaagcatgcttttgctgctgattttgctcatgccgcaatcgtgatgcccgatcacacacacctcatctgcattcagctcgtacactgcgacgagtaaacttctcatgatgcttccgaatgggtgtgtcacaagcgcaccggcacttttaatgattttcacatcaccgtttcgcaaattcatcgcatgcggcagcagttcaaccagacgagtgtccatgcaagaaagaatcgccatttttttatctggaaattttgatgtttgatacttttcatactctctttgttcagtaaatgtcttgttaaattcgagaatatcatttagaagactcatgttcgttgtccctttctattctttttactcttcaatatatcacaacccttgtttattcgtcataataaaaaaagacaaaccctctggtctgccttatttccccatgttatagcgttttttgaactgctcaactcgtccgcctttttcattgaatttctggcggccagtataaaacggatgcgtgtcagagcttacttctactttaatgacaggatatgtgtttccgtcttcccactctgctgtttcattagatgttttcgtagaggtgctgagaaaacggtagccgctgttgacatcctgaaatatcactttgtggttcttcggatgaattccttctttcatgtgaatctcctttcaataaatcgtaataattacgttttattctataaccttacaaacgttttgtcaatcttcttatatccttccctctgttttcacatcgtaaacctcatggcatttaagaataggaagaataatctaaccgaggaagcaaataataaacccaaaatacatacagaacgtctttttagaaaggtggtttacgattgtggatgatttagttttggccagaagcctctttggcacgacaatgggctttcatattattttcgcaacgcttggagtcggtctcccgctcatgattttagtggcggaattgatctatcaaaaaacgaaagatgaccattatgcgatcatggcgaaaagatggacgaaagcacaagccgttttgctgggggtcgccataccgaccggaacgatcgcgggcactcagctcgcgcttttatggccgggatttatggaagtcattggccgggtgatgtccctgccatttcaaattgaaatctatgctttttttgttgaagccctattcatgtcgatttatgtatacgctgcagaccgtttgtcacctgcaatgaggattgttgctgttttctttgtgttagtcggggcagcagcatcagctgttctgattacgaatgttcacgcttttgaaggaacgcccgccggttttaaaattttaaacggaaaaattacagatgttgacccgtgggctgcgttttttaatcctagcttttttatcactgccggccatgtcgtgctgtccgcgtttatgaccggtgcatttatcgtggcttctgttgcggcgtataaaatgatccggacgaggaaaaaggaaaaggtctatcgctttcaccggaaagcccttttgctcgcactgacgatcggcggtattttttcattgctgaccgctttgaacggacacgaatctgcacagatgctgtacgaataccagcccgaaaaattagccggtgcggaaggcctgtttgaaacaagatcccacgccccgctcgctatcggcggttttaccgacccgaatgaagaaaaagtaaaatgggcaatcgagattccatgggctttaagctttttggcagcgaaccgttttgacactgttgtaaaaggattaaatgcatttccgagagatgaatggccgccgcttttcattcacacgctgtttaatgcgatggtcggtgtaggcatgctgcttattctttattctattattggtgtggtctggagaaaggtgctcaagaaagaccgtttcccaacgtggcttttggtcattttcatgacagcaggcccttttagtctcatcggcattgaattcggctggattttcgcatgtacggggaggcagccttgggtcatctatcatttgctgaaaacatcggatgtcgtaacaacgactggttcgatcggagtgctcttcttgtttttcacatttgtttatgccgtgttaggcgctgctgtcgtctacgtgctgctgtactatttccgcaagcacccggttgacgaagatttaaatacagcggagtcgtaatggctccgcaaacaggaaaccaaatggaaggagatcgacaaatggagatttcaactgacgctctgatcgccatctcaattatctggggctttgtgtttatttacgccgtcatggcgacaatggattttggagcgggattttggtctatgatctatttaaacaaggagcatatgaaggccaccgatattgcgaatcgctttttgtccccgacttgggaggtcacaaatgtctttattgtggccatcgtcgtggcgcttttcagttttttccccggcgcgacatttgtgctcggcaccgttttattaattcccggaagcatgattttactgcttttagcgattcgaagcggatttctcgtgttttcaaatacagcaaaggagcggaaaacgctaagatatatttccggcatctccggctttatcattcctgctattttaattttggtgcttcctgtgacacacggagggtttatagaaaaaacggatggaatctataacttaaatatgtctaaaatcttttcaagccccaacgcctattcatttatcgggtttgcgattttaagcaccttatttttgtcctcgctgctgcttgcagatgtttcaaatgtggcagaggaacaggatgcgtaccgagcctacagaaaaagcgccctgattaccggcccgatttcactgttgtttgcagtatgcattatggtgacaatgcggaatgaagcaaactggctgtacagcggaatgatgaatgattttacttggattattgcatcgttcattacatttgtcattgctggaatcgccctttttctgcctaataagagctttgggcaaaacatcggaaaaccgcggcttgcacttgtcgcgattgggatacagtattttctcgcaagctacgcgtacgggcgggcgcatcttccgtatatgatttatcccgatgtgacagtcatgtcaggcttcacagagccagcaacgttcagagcgctgtttgcaacgtatatcgttgcatttatcattctatttccgggcttctttttcttctggaaaatgtttatgcgagataaacgctatatccgccaggaggaatagagggcaagccagccggctatactaatccagaacctttataaggaggggatggcatggagcagaaaattctatgtgaggtcaacaactgttcttattggggcaaaggtaacaaatgcaccgctgatgccatttatgttgtcagccatactggtgaaacggctgaaaacagccgggaaacagactgcaaaacgtttaagccgcatgatttgtaattaaaagaaagagctgcatcagccagctctttctttttgcatgttgagtgttctcagctttttagttatgaccccgtttgcaggtgaaaacaaaaaggcgcttgcataacatacacctgtcatggccgccatcgctcctgaaatcgaaacattaagccacgttgcgaagaaatagcccatgaccgccgacagcccgccaatcaacgcgctgagaatcagcatataaagaagccggtctgtcagcaaatgtgccgcagccggcggaacaatcagcatggccacaaccaatacggcacccaccgaatcaaaggaagcaacagtcgtcaaggacagcatgcccatttgcacgtaatgaatgagcaaaaccggtattcccaaggctaaagccatttgaggatcaaacgaagcgattttaaactccttatagcacacactgatcaacactacgtttaaaaccagaacagatgccagcatccaaaacgctttcggcccaatatcaaccccgaataccgtcaccgtattccacggcacaaaagcgatttctcccattaacgagtgctcaatatcgagatggacattcgctccatacacagaaagcaaaataaccccgattgcaaataaggatgtaaacacaactcctatggcagcatctgattgaacccccttgctatgaagaagctgaaccaagaaagccgttaacagaccggttgcggctgcgccaataaacatataaatcccatcgagacttcccgtcactagaaaagcgccgacaatgccaagcaacactgtatgactgattgcgtcggccagcatcgccatgcttctcagtacaagaaatgtgccgatcaatccgcagcttacaccgactaatacaccggtagctataatccatgcttcaaaactcattcgcgatctgtcccttctcggcatcatgagacacttttcgaagctcaggcatccgtccatacagctttaagagtgaataaagccgctctctcgtttctctcggtaaacggtccgggtcaaagtagtcctgatcggattctatattggcaagttccatttcatgcatgagatacacttcatacatccgctgcttcaaagctgtgtgatagcctttttcaatccctttgcttgtgatttgccaaatcccattttcgatacgctcaatgcacctctcttgttccaagtcatttaatgccttaaggcataatgaaggggataggcgtcttttctttcttacactttcaacagttacacaaagatttttcttttcatactgttcataaatcgccaaaagcacttgctccctgcttgttctgcgccgcagcctcatcagccttatggctttagcagccaatccccgcttaggcgcgcaaatcattgaaaaaagaaagagcagcgttgcagataagatcattaatggccctgtcgccattcccttcatcgtggtgctaagcagggttccggccactccgctgaccccgcctgtaatcccggcaatgatgatcatcccggttaatcgttcggtccaatatctcgcggttatggcaggtgtaatcagcatagccgccattaatatcacaccaacagtctgaagcccaatgacgacagcacagacaatcagacaagccaaaagcccgtttaaaaaacgcaccgggattcctaatccctttgcaaacgcgagatcaaaagtaatcaatgtaaattccttaaagaaaacaatacataggagcagcagagcagcggatatccctgcaataaggatgatatcctgcctgaccaatgaagcagcctggccgaataaaaaagaatcaagcccgctttggcttcccgccccctgttgctgaatatatgtcagcagaatgatcccgacgccaaaaaacacagaaagaacaatcccgatcgccgagtcctcctttgtttttgaaagccgaggaatcagctgaatacaaaacgttccgagcagtccggcgagcgctgcccccagcaaaaagaaaggcagtgatttttgcccggtgaacagaaaagcgagacacactcccggcagagctgaatgggccatcgcatcgccgattaaactttgctttctcagcagcacaaagctgcccaaaacaccgcttgccgtcccgagcaaaagcgtaccggccagcacccactgtgtattcggatgctgaagctgcagccacaaactttcaaacattgcgctcactccttatgtccttctgccagcactttatcttttaaaaacgtaagccttcctccatatgttttttgcaggttttcgatcgtaaaaacgttttccgccggtccgaaagcgattttccttaaatgaagcagtaagatccaatcgaaataatcctcggcggtctgcagatcatgatggacgacaagcacggtttttcctttttctttgagctctgccaacagcgtcataatcgcgcgctccgtcgctgcatcaacacctgcaaacggttcatccataaaataaatgtcagcgttctggcagagtgcccgggcaagaaacacccgctgctgctgtccgcctgacagctggctgatttgcctcttcgcataatcatgcatcccgacttttgttaatgcggccttcgccatctccacatccgctttctttggcctctttaataaaccgattctcccgtatcttcccattaggacgacatcgagcgggcttgtggggaaatcccagtcaaccgagccgcgctgcggaacatatccgattctggtccgctgatccttatagtctttgccgtaaatagagatgtctccggaagctctgggcacaagaccgagaatcgttttgatcaaggttgattttcccgcgccgtttgggccgataatgccaataagttttccttcaggcacctgcagcgaaatgtcctgcagtacaggctttttatgataagcaaccgtcacattatcaagctcaacagggaacatatcctccacctcttttctttatttaagcgctttagtaatcgtgttgatattgtgacggaacattccttcgtatgtgccttcttttgtgcccttttcacccatggcatccgaataaagctgaccgccgattgtgactgtatggcctttttctttagcgccttccaccactgcattgattgatttttcagatacactgctttctacgaacacagcttttatttgtttttctgtcagaagatcaaccagctcctgaacatcccttaatccatagtccgaatctgtgctgagtccctgcaggccttttaccttaaatccatactcattcccaaagtacgcaaacgcatcatgagcagtcacaagcacacggcttttctccggaatatgtgcgatctccttacgcgaccacttatctaaatattgcaaatcttctttgtactctttggcatttttccgaaaggcatctgcgtgctgaggcattgctttgctgaattgcgcttcaatttcatccaccgcatagatccataacggaatgctgaaccagacgtggggatcaaacgtcttgccttcccccgcgggaataagcttatttttcggaatggcctcagctactgccgccgattgtttttgttcgccgattttttggaggacatcctccattttcccttccaaatgcaacccgctgtacagaacaacatcggcagacattaattttttcgtgtcaccttgggaagctttgtaaaggtgcggatcaacccccggtcccattaaagaggtgacttttacatgcttacctccgatgttttctgctgcatcggcaatttgagatgttgtcgctgtcacttgtaattgctgatcagcgctttttccggctgaatccgttccgcatcccgttaaagcaaaggtcgcaaaaagtactgctgccatcagcccttgtctcatatttctcctcctctttgccatcaatgtccgattgttttatcttatgttgtcagttcttagacatgtgacattaaattagccaaaagcatgttttatttacacaggacaaaaagtttcccttatgcaaaattatcgcgtttggccatttttgtcaagctgatttacataaaaaaaccggctgggtcagcagccggtccaaacgagaagggatgtattcaacgaacacttttactgtaacagcacagtgtcatttattcaaaatagcaaaatgcttttttcttaaccatgctgtgtgaaaacatccattttggtcacatattttcgcataatatcttggtttacctcaacccctaaaccaggctgttttgacacagaaataaatccattatcaatacgaatatcaggagttacaatatcttcatcccaatagcgtgaggatgaagatatatcgccaggtattgtgaattgaggcagtgaagcaagcgccacgttctgcgctcttgatatgcctgtttccagcattcctccgcaccaaacctgcatatgatgctctttgcataaatcatgaatttttaaggcttctgttaagccgccgacacgagaaggttttatattaataattttgcagcttcctagctcaatcgcccgtctcgcatcatcaactgaacaaatgctctcatcaaggcaaatggccgttttcaaatgtttctgcaagtggcggtggtcaacgatatcgtcagcttggagcggctgctcaatcatcattaaatgatagtcatcaagctcctttaaacggctgatatccttcagttcgtaagaggaattggcatcggccataagcgggatgtttgggaatcggctgcggatggccttgaccaattccacatcctgcccaggctgaattttaatttttattctttgataaccttctttttgatagctctcaatttccttcagcatatcgtcaagaggcgccaggccgactaccaccccggcagggactttatctcttgttccgcccaatgcctcagcaagggatacgcccttctttttggcataaatatcccatacagccgattcaagtcccgcttttgccatccggtttcctttataccgcgccaggctgtccggcacttctgaagggtgattgaattcacggccgacgacatttgggataaaaaaatcttttagcatatgcaaacatgttccaatggtttcctcggtgtaccaaggcgaagagaaagcggaaacttctccccagcctgtgacacctgatgtatcaatggcttccacgatcagaaatttacgctcttgaagcgtttcgatactgtttttaaacggtttctttaagttcatgctcaaatggtaaagcgtgattttttctatttcgatcatagcagttctcctttacgcgcatccttcagctgatttcgcaagagcttattagacgcattgcgcggcaggcggtcaagcacaaagaattttgccggaattttatacttcgccaagcgttctttgcagtagtcagtcaattctcctgcgctcacaggcttgtgaaggacaagataggcgtgaggcactttcccccattttttgtcctcagcccctgaaaccccggcttcggccacagcggggtgtgaaagcagtactgactccacttcggccggataaatgttttctccgccggatatgatcagatctgaacgtctgtctaatacatataaaaagccttcattgtccaaataaccaagatcacctgttttcagccagccattttgaaaggaggcttcgtttgcgctctcccggttaaaatagcttttcatgacattcgggcctttgaccatgatttcaccgtgttcatacggttcacatacctgtccgtcccgctctattttgatttcacatgaaaacagcggtttccccgcagatccgagcttttccatactgaattccggcgacagggtaacaatttgtgagcatgtttctgtcattccatatgactgaaagacagggaatcctttctcacggcattcctcaagcaatggcagaggtgcagggccgccgccgagaagaatgcatctgatggattcagggcagcggcttgtttcttccaaaagactggccagcatagtctgcaccgcagatatcattgtcacttcatgcctgttgatagaattcagcacatcgcttacggaaaaacgctggtgaagcacgacagtcattccatagatcacagatttaaataatgcggacaatccgctgatatgaaagagcggcaatgcgataagccagcggtcttgttctgttatacccaaattaagcgcggacgacaccgcactgaaatagtggtttccgaacgtttgctgaactcccttgggctttcctgtcgtacccgacgtatacatcagcgttgccgttgcatccatttgcatataagcctcgatctcaatttcctctgctgcttctttcatcagttcatccacatcaatcgtttgaacgatgtgttgatattctttcttctcaaagcttgaatctgtcaataaaaagccggatcccgaatcctccagctgaaacagcctttcatgtgttgacagcttcgtattcaaaagcaccgccttaacaccaagcaaaaaacaagcgtgaacagcgtataccatttctgcacggttttggagcaaaatagctgcagtatcccctttccgaaccgaatgagcggcaagctgttccgccattcgtttagacgcggcaaacaattctgcaaatgtcacggtttggtcttcatagatgagagcgattctctcaggtgtcagctgtgcccgctgcatgagccagttgggctgttctgtcagcatgtcatcatctccgaggtaaaatgtctgtattgaaaagaaaacagcttggaccgcaaagtctcaagctgttggtttactaggtattgctgatcacggaaaacgagggaactgtccgaaatcaggtttgcgtttttccttaaaggaatcacggccttcttttgcttcatctgttgtgtagtaaagaagggtagcatcccctgcaaactgctgaattccagcaagtccgtctgtgtccgcgttaaacgcagctttaagaaagcgcagtgcggtcgggcttttttcaagcatttcttcacaccatttaatcgtttcttcttcaagctgttccaaaggaacgactgtgttgacaagacccatgtccagtgcttcctgtgcgttgtactgacggcataggtaccagatttcacgtgcttttttatgtcctacaattcgagccaggtagccagaaccgtaacctgcatcgaagcttcccactttagggcctgtttgtccaaaaattgcgttgtccgcagcaattgtcaagtcacatacgatgtgaagcacatggcctccgccgatcgcatatccggacaccatcgcaacaaccggtttcgggatgacgcggattaaacgctgaagatccaatacgttaagacgcgggatctggtcgtctcctacatatccaccgtggccgcgcactttttggtctccgccagaacaaaatgccttgtcccctgcaccggcaagcacgataaccccaacgttttggtcgtctcttgcgtcagcaaacgcatcaatcatttcagcaaccgttttaggggtaaacgcattatgtacctcaggtcggttgattgttatttttgcaatgccattatacgtttcatacaatatctcatcgtatgtccgttttgttttccattcagccatatgatgacctccttttattctctatgtgaatgagtcagatgcttgtcaaaaactcactcactattttaccaaacaatcgcggctgttccacatggaccgtatgtcctgcttttggaacaatctctattctactagaaggaagcatcttatgcacctcttgattgatggcgcaaaatttttcgtcccactccccgcagataagaagcacaggaacatctatttcctctacacggctccacaaggaaggctgtgaaccggtgcccatgccggttaaactgttcgcaagcccaatcttattgttccgcagacggcccgatcgtatcctgtgccgaatatcttcagccagcctctgctgagatgaaaacaaagggatattctcccaatacgcaacaaacgctttgagcccgtctcgtaaaataaaatcagcaagcttccggtcccgcatgattcgttcccgccgttccccaagtgttttgagccccggcgtcgtgctttcaagcacaagtgccgatacccgctcgggatatgtcatcgcgaaagagtaagcaagccttcctcccatagaatacccaatcaatttcactttgtgaagttttaattgatcaaaaatctcggcaaggtcagaaacttgccggcttgtgctgtatcttttcccattcagcggggcatcggtttccccatgccctaaacaatcaattttgatcaaacgggaatcaggcagcatttcatcaagaaaagtccatgattgtttgctgccggtaaacccgtgcagacagacgacggcttcggaagcattcggtccctcgtctgccactgcatatcggacaccatctgataccgttatgtttacagttcccattgttttttcacttcccgcacagcctcattcagcatatcgcgatgaagctggactcttgattggcgatccgttttgatttcaatcaaatggagtccgggcttgtctgcctgcggcgcgtaagctgttttgaattcatcccaagaagccgggcatgaatacgttccgccgtaaagtgcagcggcatgcttgaaatcgagccctgtcggtgtgccgaacaaatcttcaaagtgtgtcttctcagaagcctgcggcaaaaaggagaaaatccctcccccgtcattattgacaagaatcacagtaagtggaatacccagctttttggccgccagcaagccgtttaaatcgtgataaaaagataaatctccaatcacaagggtaacaggcgcttttgttccttcacatacccccatggcagaggagacgacaccgtctatcccgtttgctccccggtttgaataaatccggaaagggcggtcctgcttttcgaaaaacgtatcaacatccctgatcggcatgctgtttcccacaaacagcgagctgttttcaggcacaagatgctgaaggattcgatagagattgccttcaaacgaaacatcttcactgctgattgtttgcagatgctcgcggaaccgcccattgacaaactgccacttttccagccactctgaggatctggcagcagcagtaaggcctcccatgatctcctcagcaaaaacagacgcattacaatgaatcatatgcgcgcttgcctgtgtcgggtctctccaccctccatcctcgtcaatcactatttgctgaatcgcaggatcatccttaagccataagaaaaccggttttgaaacaggcatcggtccaaaccgaatgacaacatcaggacgaagtttccgcttcagctcatcatcttttaaaaacgaatcatacgcatcaataacagtgcttttatcatgaacaccattccgcagattagacagcggatccgctaaaattggatactgaagcgcttttgacagcgcaataatgttttccttatccgcatcactatggagctccccgcagacgatcattcctttttcagcctctgcgagcatctcagccacatcagacagggactctcggtcaacagactgcgtacccgttttcacagacacatgacggcctgttctcattcttccaaacggctcatctgaaagatccggcatcagcggttcgcgcagcggcacattcacatggacaggccccatcgggcgcttttgtgcttctccggcagcgcggcttgccagcgttcggatgtatctcagcatttgcggagactcttcaggaagagcagagtctgtgaaaaacttaacaaagttaccgaataagaagtgctgattaatagcctgcggtgcgcctacttcgcgcagctcatgaggccgatcagcagttaacacaataataggcacccttgaataatgggcttcaaccacagccggataaaagttggccgcggctgttccagatgtacagatcaatagtacgggacgctgcttcgcttttgccaaacctaaggcaaaaaacccggcagatctttcatcaatttggacatggacgctgatatcgggatgcgcagcacaaagaacagccagcggtgtagatcttgagcccggacaaacgacggcgtccgtaattccggaaagggcgaattcatcaataaaacttccgatgtaatgagtaatcgggttgactgtcaacgcctctcacctcctaatgcagagatcatcggcttcaatttaatctgtgtttcttcatattccgagattggttccgagtcttccacaataccgcacccggcaaacagccttgcagtgcttccttcgatcagccctgaacgaatggctaccgcgaattccccgttatcctggctgtcaatccagccgataggggcagcataccagccgcgagacatcggttcaatctccctgatcacgtcaacagctttttcctgaggtgctcccccgagcgccggagtgggatgcagcttctcaattaagtcaaaaattgaagcagactcgcgcagctgtccgacaatcggcgtaaacaggtgctgaacgctttttgttttgtacaaaacaggtccatcaggcttttcaacctctgaacagcttgatacaaaagcattatgaatcatacctaccacaatatcatgctcaagcaggtttttctcatcgtttaataattcaaggcctatccggcggtcgtcttcttcattcacgcctcgtttaatggagcctgccagacaggaagacatgacagtgccgccgtctcttttgatcagtctttccggagacgcgccgacaaaggttttgccttcttgttcaattgcaaaaacatagcttgtctgctgatcgtccagaagcgttttaagcaccggttcaatttggattggaccgtcaaacgtgagcagcagctctcgggcaagaacaaccttatcatattgtttctctttaatttggcttgtggccgtttcgattgctttcagccaatcatccttatccagctcttcggctgctgcaatcacagcctgatcttcttgcttgaaatcgggaaccataaattccgccgcaaaagcttttaagccttctaaaacagcttctgcgtcttctcctccgcttacccatctgttaactgttaagaacgggccttcagcagtcatcgtcagcataagcgcaggcacaaagaaatccccttccgagaaatggtcccattgtgaacctctttcttcgcaagggtcaaaagaaaatcctccgaataacacaggtcccactgcagaatgctgcagcttttcttcttcataaatatgaaaagccgtctttttaaagcgctcccattgttcaaaaacctcacgataccgctcgctgtttttttgatttgtctggaaaaccgcttctttgccaagaccgactattgtcaattcactttcaggatctgaccaaaaaaatcgattgcctgtatatttttttgctccgtaattgaaaaatgatagagggtcaagagactcgatttgtctcgaatagcttattaagacagcatggttgacttctttggctttatgtaatgcatgtagaacttcctttcggaacgtacgctgcaccgttgtcaccatgagacattcctccataatccttaaaatgcttttaataccatacacctgtgtctcctttgtgtcaaacacagatcatgcagtccaaatggcctgccttacctattataaacctaatttcagaaatgaaaaagaaacaaagcttaaatttctttctccactgatagcaaaggttgtatccgcttaccataaaaggaaaacctcctatattcctccacccgccatttatgaaagttctcaggcgatctgttcatactaaaggtatgcatcacagagaaacgaggcgatcacattgcttacgaaagaacagcttcagcatttaaaaaatgaactggaacaaacgaaaaaagatatcttaaaccgtttcaaagacaatgaccattttcagcttaactcagcctttccttatgattcgtggggtgagctttcggcatacgacaaccatcccggcgatcaggcgacagaactttacgagcgtgagaaagacatcgctctagacttgcatgagcgagagcaccttcgggacattgagcattcattgaaggcgatagaaaacggtacgtatggcatttgtgaagtcagcggaaaggaaatccctttcgaacgacttgaagcgcttccgactgccacaaccctcgcggagtattcgtcacaggacgtggtttccaaagaccgtccgattgaagaagaaacaccattcgggcaatttgaatttgatgatgatgaagaaatcagagcgccatatgacagtgaggattcctatcaggatgtcgaaaaatatggtaactcacaaacgccgcaggatatggaaaaccctccgctcagctatgatgatatgacgatgaataccgaagagaatatcggcaatacggagtcttacgaaaatttcatcgctacagatatcactggaaaagaaattaccgtttatcaaagcagagcccatgagcgctatgaagaagaacttgacgaagagggaatcatgaccacattcggcgatctccacgctgattgaacccccaattattgggggttcttttccgttttcagcatatcgtaaatcagcttcagataatccttttgcaggccgatgtcataccgctcgccctctagcaatttcccgtatacggtacatgccccgagcgaagcttttatcgcatccgttacctgcacttctcctccgctatcagcttctaatgcctccagctcattaaaaatatccggtgtgaaaatataacgccctgctgcggcaaaatgagacggagggttttgtttaggcttttccacaatatcctgtatgcgataaagccctttttcaacaggctccccttttatcaccccgtaatgatgtaaatcctccgtttttgtttcttttaagccgatcacactggactgatatttcgtatacgcttcaatcagctgccccaaagccggctgattggcggaaaaaatcagatcatctggcaaaacgacggcaaaaggctctccgcctgcaaattgctttccgaaagaaatggcgtcgccaagaccctttgcataaggctgccgcacatagtgaatccgtatatccggaatgggatgctctctaagtaaatgcagtttattcttagaggccaaaaaagcctcaagtgccaaagaggaatcaaaatagtcgacaatcagatttttatggctcgatacaaccatcaaaatgtcctcaatgcctgactcctttaattcttcaacaagataatgaatcacaggcttagatcctaccggaaacatttctttcggaatcaccttcgtcaccggcagatttctcgtgccgaatccgcctgcaggaataatcgctttttttatcatggtattttcccctcagctcatgtttattacatgatattccaagagcgcatcccgatgtttgtacatctgaaattaggcggaagcaactgggcagaaagcggaatcacgaaccagcccttttttaataggatattgatatatgaccagtaatcttgtaaaggagctcaggtgatgaaaatttgtgtggttggcgccgggtatgtcggtttaaccctatcagcggcactggcatccatcggacatgacatgatatgcacagacaaagacgtcaaaaaaatcgggcagctgaaaaaaggagtcattcccttttacgagcctgggctttcagatgcaatacttcgttgcggcaatctctcgttttcttctgaagtgaaatcgagcatggaggaatgtcccgttatttttatcgcagtcggaactccgccgcgttcggacggatcagctgatacgaaagccctgcagtccgtcatcggtgatttaagcgaggcgatccgatcgtataaaaccattattacgaaaagcactgttccgcccgggacaaatgaaaacatagcaaaacagctgattgcctccggagtgtctaaaaacctctttaatatcgtatccaatccggagtttctgcgggaaggcaatgccttatatgacatgctgcatcctgacaaaacagtcatcggtgttcaggaagaagatcacgtatcggcagccatcgtcaaatccatttacaaacacattgataccccttttatcgttacaagcttagcgggagcagagctgatcaaatatgccaacaatttctttttagcggccaaaatttcgtttattaacgaaatggcccgcatatgtgaagcctatcaatcagatatctcagatatttcccgcgctatcggtctagacccaaggatcgggaagcactttttgcaggcaggcatcggatacggaggctcttgttttccaaaggatctgcaggcgctgcaatttgctgcccaggaaaaaaacacggagaccttcctgctccgggccgtgcagcacattaatgacacccagctcggcctgtatatcaaaaaaatacagtcattcttcgaaacacttcaaggcaagaaagcggctgtactcggcatttccttcaaaccgaatactgatgacatcaggaattctcaggctgtcagactgatggaaaggctggcggagctgggatgtgatgttcatgcatatgatcctgaagctgtacttccagaacatttgcggaagcatgtaactcagcattctcaagcttttgatgcgatcgaagaaagcgactttttatttttggcgacagaatggcccgagtttttagcgtttgattggaaaaaggctgcagatatcatgaaagggcgtcttgtgatagacgggcgcaacgtactgaaaaaagaactgatcgagacttgcggcctgatctgtacgggagttggccgtccatgaaaatactcgtcacaggagcagctggctttatcggctcccacctctgcgaagaattactaaaagataagaaacataacgttatcggaatcgatgactttatcggtcctactccattttccttgaaattaaaaaaccttaaaaacctgctgccggaaaagcgatttacgttcataaaggaaaatctgctgacagccgatcttgctcccttactggaaggagtggacgtcatctttcatttggcggccataccgggtgtccgctcaagctggggcaatcattttcacccatatgccgcacataatatccaggcgctccaaaggctcctcgaggcgtgccgggaacattctattcaaacgttcgtctttgcatccacctcttccgtctatggcgaaaaacaaggaaaagtcagcgaaaacacgtcgctttctcctttatctccgtacggggtaacaaagcttacgggagaaaagctttgccatgtgtatcaacagagctttggtattccaattgtgattctccgtttttttaccgtatacgggccaagacagcggccggatatggcttttcaccggctcattaagcagcaccttcagcaaaagccgcttaccattttcggtgatgggcagcagtcaagagatttcacttatatcggcgactgtgtcaaaggcatcaccgctgttcttgggaaaccccaccttattggtgaaacagtaaatatcggcggcgcagagcgtgcctcagtcttaaaggttgtctccctcattgaggatatttccggtagaaaagcaacactgcacttttcggacaaaatagcaggggaaccgagcaacacgtgggcggatatttcaaaagcaaaacagctcttgcattatgatcccgccacatccttaaaggatggcttgaccaacgaaatcgcctatttatcgtcgctgtatcagggggaataaaaatgaagcttgcctttatctgtacagaaaagctgccggcgcccgcagtacgcggcggcgctattcaaatgatgattgacggtgtcacgccctatttcagcagcaggtacaacctgaccattttttcaatagaagatccatcgctcccaaaaagagaaacaaaagacggcgtacattatatccatctgccaaaagaacattaccgcgaggcggtagccgaagagctgcgagcctcttcctttgacctcattcatgtgttcaacaggcctttaaatgtctctttatataaaaaagcctcaccaaacagcaagatcgttctgagcctgcataacgaaatgttttctgaaaaaaagatgaccttcgcgcaaggaaaagaagtactcgacaatgtctccatgatcacaacagtgagcgaatttattaaacaaaccgtcattgaacgtttccctgaagccgaggacatcacaaaagttgtgtattccggcgttgatttaaactcttatccgcccgtatggacgatgaaaggctcggctgtcagaaaaacataccggaaaaaatacggtattgaagataaaaaagttattttattcgccggccgcttaagcccgataaaaggacctcaccttctcattcacagcatgagaaggattttgcagcagcaccctgatgctgtactggtcatagcgggcgggaaatggttcagcgatgacagcgaaaaccaatatgtaacctatctgcgcacgctggcgctgccatacagagaccacataatctttacaaaattcattcccgcagacgacatcccaaacctttttctgatggcagatgtatttgtgtgcagctctcagtggaacgaacccctcgcccgtgtgaattatgaagcaatggcggccggcacgcccttaattaccacaaatcggggcggaaacggagaagtcgtaaaagacgaagtcaccggccttgtcatcgacagctacaacaaaccttcttcatttgcaaaagcaattgacagagcctttacagatcaagaattaatgaacaaaatgacaaaaagcgcccgaaagcatgtagaagctttatttacctttacccatgctgccaaaaggctcaatactgtttaccaatccgttctgaccccgaaaaacaaacaatttccgccgccttttctgacgcaaaattttgatttatcatctatcaatcagctttttgtgaaagcaaaaacataaaacctacagctcgtgttgcaaaacgggctgtttttttgctgcagaaaacataaaaaaaggcataaatgtgactttatgccttgcgctttacggtttgagaaaaccatggagctggtttagattcacttggaagaatgatgatttccactttagcttcttccgctaagtctggttcttcatcttcatcctcttcttcatatggggacactgagcgtttcgaatcacgctcctcctcaggctctagaatggtttcgaatttcgtttcttcttcatcatcgacgattttgtgatctgtttccttttccttcgtttcttcttgatattctttcggtgcattgatgtgagggagctctcgaatgctgcccacatctaaatgcttctcctcttcttccttctcagctgacattgagtcatgagcctgccaccccatcggcccaggcggtgtaaatacgaattggtcgagatccagtttagaaatagaggctttttgtctcgatgacctcatgtcaattcgcctcccgatacgcttttatctttttatacagttccggcagtttatccaaaaacgaatctttagattcttcaacagaaatcatgttttgcagcgcccagttatatttctcatctgaccacgttttcttttgcttcaaataatatttgtgcccgattgcacagaacaaatgcggaaacgcgagatcaatccaaagtacctcgtactgtttttctgtgagcggatacactgcgtcgtaggccgcaagcagtgcgaccatgaaatcagtatcccatacagaaagcttaaccatcactttattcagcagaatacgaaggtctcttgacggcaaatcgtaggtaatcgagtgaagctcctttaaaaaaggctccccttcgatctctgtcaaacgtgccaatgtaaaatcttgaaaacagaatccgccatgctcgagcgtttcttttgtccaggtttcgtattctgagtcatcaagcgcctgaagagcttcttttcctcttgccagcattttatcagcatgttttaagaaagtttgcgaaaatacgtcatcaggataggatgccgcgatctgcatattcccttcaagttcctgcagcttccatcggtacaatttatgccattttcccagcctgcttctcttcttgctttcatctgtgcaaacatatccttttgaggcatgatgaaaatggccggcaaatgacatgacttttttcatttgctctgcatcatagtaaatcatttcttttcctgtcactttgtcatataagctgtaagaaacctgatccgtgcccaagcagctcccgccattttttgtttgatgaatcggcgctatcggcagccctttctcttgtaaatgagcgtgtgcctgagtgataaaaagcatccgctccggtttcatttgcgcttcttttagcagctttgggccatgatcagtttcgacttcccagattttgcgcccgcttttgttcgatttcagcgccacatggtcgatatgaaacggataatagctgagaatttcggacacaatctgttcttcatgctctttttggtacactctgttcaccccttctatctgttcttttcatagacgctgagcagattttcagccaccctctgccagccaaaattgctttctgcctcacggcggctgtatttcccaagccgttcccgcttttcagagctgctcagcaaatcattgatacgttcggcatattgtttaggattttcaaagtcatgaatgatgtagccgtttttcccttcctctatgacctctggattgcctccccgattgcttgtgataattggaagtcccgcagccatcgcttcataatgcacccttgctaaaggctcctgccattgcgaagagcatacaaatacatctgacatggtataaaggcgcggaatgtcctttggcttcacaaattgaataaatgtgacatgatccttttgcatcgcaccaagggtatgaagatgtttgacatagttatttaattcattatctccgaaccattttgacccgataaacaccatcatgacatcggggtgctcctcaatgatgtccggcaaagcctgcaataatatgtgcgggcctttgactttgctaagccggccgacaaacaagacgatttttttgccgtgaagccccagctcgcttcgcatctcttcgcgagctcgctgcccttcattcgtccagcgagggtggtacgtttttaaatccacaccagaatacaccgtttttgtttttgatcgtgctgacggaaaacggcttgtgatcgtctgtccgatataatcgctgaccgtaacaatctgcgctacggagtcgatgcaaatctcgccttccgcctggctgattttatcgtaagcgaacatttcattgtgaacgcttaaaataaaaacagcatccggcgcctgtttcttcaatttcggaacccagcttgggcgattacaaacatgcacaagatcaaaacggctctttttcagctctgctccaacggcttcttcataacggtcttcatccaaatgcacataatggacaccgtctaccttctctctatcagcgagattcggatctttaatagaaaacacagtcacctcatgtttttttgcaattaaaggggcaaccgcttcgaggtagatttgaatggcgcctcctcgaaccgatgggacaggaagcttctctgtggcgatcagtgctattttcatacatagcctccattcctgcatgatttttaactagttagaatcatgatacggctgaacaaccaacttgtgcggaatgggactgccctaaaaacaaaacgggtaaacaaccagattcatctattaaatatagtcaaataactcaatcattttttccttttgattcataaggtaggagtaaaacaggtaaggatgtgtcctttaatggcagaaaaccatgaagtcattgaggaggggaattcatcagagcttcctttatcagcagaagatgcaaaaaaattaacggagctggctgaaaatgtgcttcaaggatgggatgtgcaggctgaaaaaatagacgtcattcagggaaaccagatggcgcttgtctggaaggtccacacagactccggcgcggtttgtctaaaacgaatacacaggccagaaaagaaagcgttgttttccattttcgcgcaggactatttagcaaaaaaaggcatgaatgttcctggcatactcccaaacaaaaaaggcagcctatattctaagcacggctcatttctatttgtcgtatatgactggatcgaaggaagaccgtttgagctgactgtaaagcaggacttggagtttatcatgaaaggccttgctgattttcatacagcttccgtcggatatcagccgccaaatggcgttcccatatttaccaaattaggtcgctggccgaatcactacacgaaacgatgcaaacagatggaaacgtggaagctgatggcggaggcggaaaaagaagatcctttctcacagctttatcttcaggagatagatggctttattgaagacgggctgcgcatcaaagaccggcttttgcaatcgacctatgttccatggactgaacagctgaaaaaaagccctaacctttgccaccaggattacggaaccgggaatacactcttaggagaaaatgaacagatttgggtcatcgacttagataccgtatcatttgatctgcctattcgcgatttgcgcaaaatgattattccgcttttggatacgacgggtgtttgggatgacgaaacatttcatgtcatgctgaacgcatacgaatccagagccccattaactgaagaacaaaaacaagtcatgtttattgatatgctgtttccttacgagctttacgatgtcattcgcgaaaaatacgtccgcaagtctgctttaccgaaggaagaattagaatcagcttttgaatatgaacgcattaaagcaaacgcattgcggcagcttatttaagaccatcatttcccccgcatatcgggggtttgatctttataagataaagggtaattaaatacatgcggaggttgcaaatatgaaaaagattgtcggcgctttagccgtttttgtgattacatatgcgctgttttcagccgcaggctacctgtttcctgtggaccaagaatggtacaattcattgaaaaaaccggactggacgccaagcggaactgcgatcggcatcatttgggccatcctgtttgccctgatctccctttcagcagccattgtatatgctgcgttttcatttaaaggtgcgaaaagcttttggtttacacttttgataaattacgtgctcaatcaagccttcagctatttccagtttacgcaaaaaaatctgctggctgcatcgcttgactgcctgcttgtcgccatcacagcaatcgtattactgatcattgccaaaaaatacagcagagccgcaagctatcttcttttgccttattttttatggagtgcatttgcgacgttcttatcctttacaatcaattcaatggatctgtgaacaaaaaaagccgcttatacagcggctttttcacatcatcggcttgatgccccaaatgtccttcgcatattcccggatcgtgcggtcgctggagaaatatcctgaatgagcaatgtttacaatcgaacgctcagaccatttccttcgctctcgataatcagcttgaattcgctcctgcgcatctgcatatgagctgaaatccttcagcacaaaatactcatcattatgcggaagcagcgagtcaaagatcgattcaaattcatctgcttctccttcaaaaaaaccattgatcagctgatccgctacctgcctgattcttctgtcatgctgataatattccctcgatctatagccaccattttcctgatacgatagaacctcatccgcctttaagccgaacgtgtaaatacagtcagggcccacccgctcaaagatctcgatatttgcgccgtcatgcgtgccgatcgtcaaagccccgttcatcataaacttcatattccctgtaccagacgcttccttgcttgcagttgaaatttgctcacttacgtctgatgccggaaaaattcgctcagccatagaaactctataattttctaaaaaaacaactttgatcagctgtttgactgccggatcataattgactttttctgcgacagaatggatcagcttaatgattttcttggcataataatagcttggtgaagcctttgccccgaaaataaaggtttgcgggtagattgaaaacccggcgtcctccttgaggcggttatacaaatacataatgtgaagaacattcagcagctgccgtttatatgcatgaagccgtttcacctgtacgtcgaatatgctgtcagggttcacaaccaccccggccgtgcaaaaaatcaaatcggcaagctcttgttttttcttgcttttgttgttttgaaactgttcaataaatgcaggatcagtggcgtacggttctaaacggatcagtgattccggctgtttgacccattcatcgccgatcgcctctgtaatgatggcagacaagcctggattcgcttttaacagccagcgcctgtgggcaattccattcgtcttattgttaaaacgattcggaaacagcaagtgaaagtcgcgcatctccctttccattaatatatcggaatgtatttttgcaacgccatttacactgtaactgcctactatggccagatgagccattttgacaacaccatgcgctgtaatcgccatgtcctctatccttttccagtctcccggatacttttcccaaactgcgcggcaaaacctctcattgatctcttcaataatcatgtacattcgcgggagcagcggcttaaacaaatgaatcggccatttctcgagcgcttctgacaatgttgtatgatttgtataagaaatcgtatgtacagtgatatgccaagcttcttcccagctcatgttctcttcatcgagcaaaatccgcatcagctcaggcaccgcaagcgcagggtgagtgtcattaatatgaatgctcacttttttatgcaggccggataaagatttatgtgtttttcggtaattgttcacaatgctttttaagcttgcgcatactaaaaaatactgctgcttcagccgtaaaattttcccctcatcatgggtgtcatcgggatataagaattcagaaaccgcctctgtttcccgcttataagacaaaatattaccgccgtgataatgcgcatagggctcggcgttccagagccttaacgtgttgacagtgcccgtttcatagccgatgaccgggatatcataaggaacagcggtaacaattgtcgcttgttcgtggcgaaaatgcaggcgcccgcttttttctgtcatatggacttcgccccaaaacggcacgtccactgcttgatccgcattccttacttcccatacgttcccgtttttcagccattgctcaggcagctccacctgatgcccgtctacaattttttgctcaaacaaaccatgcttataacgtatgcccatgccgtgcccaggcaggttcaacgaagcaagcgaatctaaaaagcaagcggccaagcgcccaagtccgccattgccgagacctgcatcgttctctatctgaaggatctcctctaaattgatgccgatttcctttaaaccagcttctacaacatcacgaacaccaagattcattaagttttgctcaaggagctgaccgagcagaaattcgattgataaataatatgtctgcttcccggaatttgatctgcttttttcattcgtttcgatccaatcagcgctgatatactctctgaccatattgcccaacgttttatattgatccagcttggcagaatctttaaagctttttccgcacgtcatttccagacgctttaaaaataagtctgcaaagcgttctttactcgagaacatcccgtccactccttgtcacctgctcgaaaatacgctgatactctttagccgacttcccccagctgtaatctgcattcatagcggtcttcacgatgctcttccatacatcctgttggcaataaaacgacagcgccctttctatcgtaaatttcagatcatgcgcattaaaggcggaaaacgtaaagccattgcccgttccctcttcctcctgataggcacggacagtgtcgtaaagaccgcccgtttccctgacaatcggaatggcgccatattgaagagcaatgagctgccccaaaccgcacggctcaaatttcgacggcatcaaaaacatatcagagcccgcataaatttgatgggctagcggctcatcaaacccgatataagcccggcacttctcatgaaaagcaaattctgcataccggaaataatcttcaaattcacgttctcctgtgcctagcacaaccagctgtatgtcttgctcctcaagaagttcgtgcataattctgcggacaagatcaagccccttttgtttagtgagccttgtcaccatactgatcagcggaatatcgtttttctctggaagccccatccgctgctgaagcttcgttttgttttccagcttgcatgcaagatcccctgaatcgtattgcgcctctatataagggtcgcttttcggctgatagaacgtatcatcaatgccatttaatatgccggttacatcatcttccctatattgcaaaacctgttccaactgctcaccataatacggcgtcatgatttcatttctgtaagtggggctcacagttgtcacatgatcagccgcaatgatgcccgctttcataaaattaacaaatccgttgcattctaacctttcataatgaaaatgatccatctcaagacccagcaagtcatgtgtgacatcaggagggaatatgccttgaaactgcaggttgtggatcgtgagcacgcttttcatccgttcataaaaaggatgttttctgtactcctctttcagcaaataattgaccatcgctgtatgccaatcgtgagtatgaacaatatcggctggaacattcacaactttggcagcctccagcacagctcttgaaaaaaaggcaaaccgctcaccgtcatcataatgcccgtacaacgaatccctgttgaaatagtactcattgtcgatgaagtaataattcacatcgtcttcggccatatgttcaattccgcaatattgctgacgccagccgacagctaccgtacactcagccttttttttcatacgctttttccacggttcaggtatttggctgtacttcggcagcatcacatatacttcattgcctaatcgcgcaagcgccttcggaagagcgcctgctacatcggcaagacctcctgatttcacaaatggggtgcattcagacacagcaaataatatcttcaagaattcatcagctctccttgcaccaaaccttttcttaatacaagcggctgctcagctgttcctacagcttccgtcgccttgccgattttaacgtccttatccgaaatgacctgctcaagaagacaatcctcgccaatctgcgttttttgcataataatacagtttttcagcttcgtaccctttccgacatggaccgccctgaacaaaatgcagttttcaacctctccttcaagcacacagccgtttgccaccaaagaatttttgacagtgctgtgctttccgtatttcgtaggcggctcatccttcacttttgtatagataggctgctgcggcaaaaacacctgctgccaaaaacgaggctgaatgagctccatactgtgggtataatatttttccaccgaatcaatgacagcagcataacctgaatattcataagggcaaatggtcagggcggaagattccttttcaacagcctcctgaatggttttatagcctttttcgctatgtccgtagatcagatcctttaaaagcgttgttgacatgatatagatttgcagcgactggccgtcctgaaatacctcggtgacgtcgcagccaacctcctgatggcgtttcagcacatattgaaattgaatgttgcatacggtatggctgttggagattacagcatattgctgagtgcttctgtggaagtaatctagatggtccgaaaactggcgaaaggaaccgaattcatcgtattcgtgatgaagatggggagacgggaaaaaaaagaggccgtcctttttccggtgcaaatcccattccttacccgccccaaggtgatccatgagcgaacggtaacgatacttcggaaaaattgcaacactcctaatatccgcattcaccatgttggaaagcataaaatcaatcagtcggtacctgccggcaaaagggatcgccccgagcgaccgctttgctgttaaatcctgaagagaatgcttatatgtggtttcatctataacacctaacatttgattattgaacactgactctgccccctcttcagtaattaaatcaattctttttctacaaattcctctgaaacgagcagcacctcttcaatgtctttttcggagcgaatcactgcgccatccggcagcaccatcccattaggaacaatggcattttcaatgactacatgctccccaatcgtcacatccggcattatgacggatgatgtaacagtcgtatgcttaccaacagtcacaccttgaaaaagaacggagtgagacacatttccatatacaacacaaccttcgttcacaagcgaatcttgaacctgcgcatcagatgaaataaattgcggaggctgatttggattgacggagtaaattttccatttgcgttcaaacagcttcagctccgagtcctcttttaacaaatccatattggcttcccacaagctctgcaccgttccgacatccttccaatatcccttgaacggataagcagaaagcttctttttctcttccaaaagcagaggaataatgtctttgccgaagtcgtggctagaataagggttttgatcgtccatctcaagatactgtttcaaaagcggccaattgaatatataaattcccattgaggcaagattgctcttagggaatttgggcttttcatcaaaatgtgtgatcgtcccatctggattggccttcatgatgccgaaccggcttgcttcctccaagcccacttcgatgacagagatggtcacatctgctttcttttcaatgtgataatcaagcattttgccgtagtccattttgtatatgtgatctcctgataaaatcagtacatactcaggatcatactgattcaaataattgagattttcataaatggcgcttgccgtccctttataccacttgacttctgatgactcggcataagggggtaaaaccgtcacgccaccattatatctatccaggtcccatgcactgccgatcccaatataggaattcagctcaagcggctgatattgcgttaaaatcccgactgtgtctatgcctgaatttgaacagttgcttagggtaaaatcaataatcctgtatttacccccgaaagatacagccggtttagccatattttttgttaatccgctgagacggctgcccttcccgccggcaaggagcatggctacacattgttttttcatctttttatctctcctctttttttaaccgcccgtaaaatcgagatgccgtaaggggggatggtcatcgtgatataacacggtttatgatgaagtgctccctttttagccgataatggctttttgttgatttgccctgagcctccatatgtttcactgtcactgttaagcacttcaatgtattgagtaaaaaaaggaactccaacatcatattgatgatagaccacgggtgtaaaattacaaatgatgacaagcgcctcaccgtgctttttgccataacgaataaaagaaaagattgattgttcgtcattatggacatcaatccattcaaacgattgtgcacgatggtcatgctcataaaggattttgcttttttggtaaaagcggagaagatcttgcgtaaaaacgctggctttctgatgcatggggaaggagtccaaaaaccaatcaagctgttctgtatctttccattcatcaaattgggcaaactctgatcccataaagatcaatttctttccgggatgcactgtcatatagcccagcaaaagccgatactgggcaaatttctgccagtagtcgccaggcattttattaagaagtgatttttttccgtatacgacttcatcatgagaaaacggcaatacaaaatgttcactaaacgcatatagtaatgaaaaagagataagctgatgacaatgccgcctttcttcgggcggcgtctccatgtatttcagtacgtcattcatccatcccatattccatttataatgaaaaccaagccccccttcctcaacggcacctgtcacttgaggccattctgtagaatcttccgcaatcatcatcacatggggatatgcctctctcatggtttgattgagtttttttaaaaactcaacagcatatggattcgtgtggcgttcatcctgatttggccaatacaagatattagccactgcatcaaccctaaatccatctatatgatagaattccgcccagtacaacgcattcgaaattaaaaaactatgaacttccggttttcccaggtcaaagtttgccgtgccccataaccagttctcccgatcacgttcttctttgtattcataaagcggttctccatcaaacatatagagtccatgtgcatctttacaaaaatgtccggggacccaatccaaaatgactccgatattttgttgatgacattcatcaacaaacttcatcagatcatgcggcgggccaaacctgcttgtcgggctgtaataccccgttccttggtacccccatgaacgatcatatggatgctcatacaccggaagcagttcaacatgggtaaacccatgctccttgatataagggataagcgtctgacttaattctttataggaataatgcctgccatcagaatgcttcttccaagacccaagatgcagttcataaatgaaaacaggtttttcatacagcgtcttagtcttctgtttcttttgccatttttgatcttgccagctgtacccttccaaatcgtaagtaagtgacgctgtgtttggtctgacttctgaataaatagcgtatggatctgccttcagcctgatctcaccgttattcgtcacgatttcatatttatatcgttccttttctcctaaacctggaataaataacgtccaaataccactatcattcactctgtgcatcacatgctcttctccagaccagctgttaaaatctccagccactcgtacttccgacgcatgaggcgcccacacacagaattcatatccgcttttgccattcagctcgcggtaatgcgagccaaacagctgatagctttcaaacagactgccttcgtgaaaaagataaacatcatgtgctgtcgggctggcagcggccatgtaatcatcctttctgacatcatagttttcatttatagtatttattcgaagaaataaaaaaaagccctttgctgaaagcgcttatacttatagacaattaacttcattttctgaagaaaaacgaaatatatggagatttttgtagtctgcttttaaaataaagaacaaaatctaagacatatcatgatttagaaaacaaaaaaaccttgcaggatatgcaaggcttctggatgacccgtacgggattcgaacccgtgttaccgccgtgaaagggcggtgtcttaaccgcttgaccaacgggccgataattattatacctgtaatcatatggcggagaaggagggatttgaaccctcgcgccgcttacacgacctacacccttagcaggggcgcctcttcagccacttgagtacttctccatttggctccacaggcaggattcgaacctgcgaccgatcggttaacagccgatagctctaccactgagctactgtggaatacaaaagtcatggtgggcctgaatggactcgaaccatcgacctcacgcttatcaggcgtgcgctctaaccagctgagctacaggcccatgacgatatagaaatggagcgggtgatgggaatcgaacccacgacatcagcttggaaggctgaggttttaccactaaactacacccgcaatttttatttggggcgattgatgggaatcgaacccacgaatgccagagccacaatctggtgcgttaaccacttcgccacaaccgccaaaatatattgataaatggtggctcgggacggaatcgaaccgccgacacacggattttcagtccgttgctctaccaactgagctaccgagcctaagtatttaaatggcggtccggacgggactcgaacccgcgacctcctgcgtgacaggcaggcattctaaccaactgaactaccggaccattttaaaatttggttgcgggggcaggatttgaacctgcgaccttcgggttatgagcccgacgagctaccgaactgctccaccccgcgatgattaggaatatgtatggcggaggaagagggattcgaacccccgcgggctttgacacccctgtcggttttcaagaccgatcccttcagccagacttgggtattcctccgtatagtggtggaccttgtaggactcgaacctacgaccggacggttatgagccgtctgctctaaccaactgagctaaaggtccattggtagcggcggaggggatcgaacccccgacctcacgggtatgaaccgtacgctctagccagctgagctacaccgccaaatatttttagaaatcaagtggagcctagcgggatcgaaccgctgacctcctgcgtgcaaagcaggcgctctcccagctgagctaaggccccaagaatggtcgggaagacaggattcgaacctgcgaccccatggtcccaaaccatgtgctctaccaagctgagctacttcccgatttcatatagatcatggcgcgcccgagaggagtcgaacccctaaccttttgatccgtagtcaaacgctctatccaattgagctacgggcgcaaaacttaatgccgagggccggacttgaaccggcacggtagtcacctaccgcaggattttaagtcctgtgtgtctgccaattccaccaccccggcgtggatggtatagttggagcggaagacgggattcgaacccgcgacccccaccttggcaaggtggtgttctaccactgaactacttccgcagaaatggtgcggatgaagggacttgaacccccacgtctgtaaagacactagagcctgattctagcgcgtctgccaattccgccacatccgcaacatgtaaatggtgagccatgaaggactcgaaccttcgaccctctgattaaaagtcagatgctctaccaactgagctaatggctcttcttacaagagacttgaatattatatcatataaaagtggtgccggcaagaggacttgaacccccaacctactgattacaagtcagttgctctaccaattgagctacaccggcatatatgtaaaaccgatatgtataatgaaaaatggtggaggatgacgggctcgaaccgccgaccctctgcttgtaaggcagatgctctcccagctgagctaatcctccatacttgcactaacgtgcaattgcttggcggcgtcctactctcacagggggacccccccgactaccatcggcgctgaagagcttaacttccgtgttcggtatgggaacgggtgtgacctcttcgctatcgccaccaaacaaattgagagtgttctctcaaaactagataacaggtgtgacatcattcaaaaatatggttaagtcctcgatcgattagtatctgtcagctccatgtgtcgccacacttccacctcagacctatcaacctgatcatctttcagggatcttacttccttgcggaatgggaaatctcatcttgagggggcttcatgcttagatgctttcagcacttatcccgtccgcacatagctacccagcgatgcccttggcagaacaactggtacaccagcggtgcgtccatcccggtcctctcgtactaaggacagctcctctcaaatttcctgcgcccgcgacggatagggaccgaactgtctcacgacgttctgaacccagctcgcgtaccgctttaatgggcgaacagcccaacccttgggaccgactacagccccaggatgcgatgagccgacatcgaggtgccaaacctccccgtcgatgtggactcttgggggagataagcctgttatccccggggtagcttttatccgttgagcgatggcccttccatgcggaaccaccggatcactaagcccgactttcgtccctgctcgacttgtaggtctcgcagtcaagctcccttgtgcctttacactctgcgaatgatttccaaccattctgagggaacctttgggcgcctccgttaccttttaggaggcgaccgccccagtcaaactgcccacctgacactgtctccccgcccgataagggcggcgggttagaaggtcaatacagccagggtagtatcccaccgatgcctccaccgaagctggcgctccggtttccaaggctcctacctatcctgtacaagctgtaccaacattcaatatcaggctgcagtaaagctccacggggtctttccgtcctgtcgcgggtaacctgcatcttcacaggtactataatttcaccgagtctctcgttgagacagtgcccagatcgttgcgcctttcgtgcgggtcggaacttacccgacaaggaatttcgctaccttaggaccgttatagttacggccgccgtttactggggcttcaattcgcaccttcgcttacgctaagcgctcctcttaaccttccagcaccgggcaggcgtcagcccctatacttcgccttacggcttcgcagagacctgtgtttttgctaaacagtcgcctgggcctattcactgcggctctctcgggcttgcaccctaacagagcaccccttctcccgaagttacggggtcattttgccgagttccttaacgagagttctctcgatcaccttaggattctctcctcgcctacctgtgtcggtttgcggtacgggcacctctcacctcgctagaggcttttcttggcagtgtggaatcaggaacttcgctactatatttcgctcgccatcacagctcagccttatgggaaacggatttgcctatttcccagcctaactgcttggacgcggatatccaataccgcgcttaccctatcctcctgcgtccccccattgctcaaatggtgaggaggtggtacaggaatatcaacctgttgtccatcgcctacgcctttcggcctcggcttaggtcccgactaaccctgagcggacgagccttcctcaggaaaccttaggcattcggtggaggggattctcacccctctttcgctactcataccggcattctcacttctaagcgctccaccagtccttccggtctggcttcacagcccttagaacgctctcctaccactgttcgaagaacagtccgcagcttcggtgatacgtttagccccggtacattttcggcgcagagtcactcgaccagtgagctattacgcactctttaaatggtggctgcttctaagccaacatcctggttgtctaagcaactccacatccttttccacttaacgtatactttgggaccttagctggcggtctgggctgtttccctttcgactacggatcttatcactcgcagtctgactcccaaggataagtcattggcattcggagtttgactgaattcggtaacccggtaggggcccctagtccaatcagtgctctacctccaagactcttaccttgaggctagccctaaagctatttcggagagaaccagctatctccaggttcgattggcatttcacccctacccacacctcatccccgcacttttcaacgtgcgtgggttcgggcctccattcagtgttacctgaacttcaccctggacatgggtagatcacctggtttcgggtctacgaccacgtactcatgcgccctattcagactcgctttcgctgcggctccgcatcttctgcttaaccttgcacgggatcgtaactcgccggttcattctacaaaaggcacgccatcacccgttaacgggctctgactacttgtaggcacacggtttcaggatctctttcactccccttccggggtgcttttcacctttccctcacggtactggttcactatcggtcactagggagtatttagccttgggagatggtcctcccggattccgacggaatttcacgtgttccgccgtactcaggatccactcaggagagaacgaagttttgactacagggctgttacctcctatggcgggcctttccagacctcttcatctacctcgttcctttgtaactccgtacagagtgtcctacaaccccaagaggcaagcctcttggtttgggctaatcccgtttcgctcgccgctactcagggaatcgcatttgctttctcttcctccgggtacttagatgtttcagttccccgggtctgccttctcatatcctatgaattcagatatggataccactccattacgagtggtgggtttccccattcggaaatctccggatcaaagcttgcttacagctccccgaagcatatcggtgttcgtcccgtccttcatcggctcctagtgccaaggcatccaccgtgcgccctttctaacttaaccgttaaaaagaatcactatgtgatatcttgtattactaattgaatgtgatgtctactgttatctagttttcaaagaacacgtttcgaaggaatgatccttcaaaactaaacaagacagggaacgttctgtttataagacccaaggtcttatattccgtataatatccttagaaaggaggtgatccagccgcaccttccgatacggctaccttgttacgacttcaccccaatcatctgtcccaccttcggcggctggctcctaaaaggttacctcaccgacttcgggtgttacaaactctcgtggtgtgacgggcggtgtgtacaaggcccgggaacgtattcaccgcggcatgctgatccgcgattactagcgattccagcttcacgcagtcgagttgcagactgcgatccgaactgagaacagatttgtgggattggcttaacctcgcggtttcgctgccctttgttctgtccattgtagcacgtgtgtagcccaggtcataaggggcatgatgatttgacgtcatccccaccttcctccggtttgtcaccggcagtcaccttagagtgcccaactgaatgctggcaactaagatcaagggttgcgctcgttgcgggacttaacccaacatctcacgacacgagctgacgacaaccatgcaccacctgtcactctgcccccgaaggggacgtcctatctctaggattgtcagaggatgtcaagacctggtaaggttcttcgcgttgcttcgaattaaaccacatgctccaccgcttgtgcgggcccccgtcaattcctttgagtttcagtcttgcgaccgtactccccaggcggagtgcttaatgcgttagctgcagcactaagggcggaaaccccctaacacttagcactcatcgtttacggcgtggactaccagggtatctaatcctgttcgctccccacgctttcgctcctcagcgtcagttacagaccagagagtcgccttcgccactggtgttcctccacatctctacgcatttcaccgctacacgtggaattccactctcctcttctgcactcaagttccccagtttccaatgaccctccccggttgagccgggggctttcacatcagacttaagaaaccgcctgcgagccctttacgcccaataattccggacaacgcttgccacctacgtattaccgcggctgctggcacgtagttagccgtggctttctggttaggtaccgtcaaggtaccgccctattcgaacggtacttgttcttccctaacaacagagctttacgatccgaaaaccttcatcactcacgcggcgttgctccgtcagactttcgtccattgcggaagattccctactgctgcctcccgtaggagtctgggccgtgtctcagtcccagtgtggccgatcaccctctcaggtcggctacgcatcgttgccttggtgagccgttacctcaccaactagctaatgcgccgcgggtccatctgtaagtggtagccgaagccaccttttatgtttgaaccatgcggttcaaacaaccatccggtattagccccggtttcccggagttatcccagtcttacaggcaggttacccacgtgttactcacccgtccgccgctaacatcagggagcaagctcccatctgtccgctcgacttgcatgtattaggcacgccgccagcgttcgtcctgagccaggatcaaactctccgataaatggatcacaggttaagttcaccgcatcctgcggcgacacctgtgtgacctgcgtcgtgcagaccctagtttgactgactacgcacatcgctgtgcgatttttaaaaactgaattaacaggtacgttttgtcttgtttagttttcaaagatcatttcgttacttctcaatgaagcagctttactaatataacattcagcttcttttttgtcaacaacttttttcaagttgttttgaagcatctagtttgtgtccgctgtgcatcagcgacgtttaataatataacacctgtatttatttattgcaatagtttttttaaaaaaatctataaaacaaataaactataatcctcgccatgatttctaaagcgtgtgtatcatataagtttcttaaaagaacatatacatcagtcatgtgatcttgttgtttttttcgttttcttgtatagtagaaacgaactaaatactgatgaccacaaggggagcattaaagctgagagtgagcggtttcgttctgaccctttgaacctgttagttaacgctggcgtagggatgtggcaaagtcaaatgaattgcagatcgtaaagcagtgcgtggaacttttctcatccttccgcgtgctgcttttttgttgtccttttggttgtctgtcaatggaaggagatagatatgaatcaatctaagcaactggttcgccttattgaaattgccattatgacagcggcagccgttattttagacattgtctcaggaatgtttcttagcatgcctcaaggaggctcggtctccatcatgatgattccgatctttttaatttcgtttcgctggggtgtcaaagcaggtcttactacaggtttgttgacaggtctagtacaaatagcaatcggaaacttgtttgctcaacatcctgtacagctattgttagattacattgtcgctttcgcagcaatcggcataagcggctgtttcgcttcttctgtccgtaaagccgctgtatcaaaaacaaaagggaaattgattgtttcagtggtcagcgcagtttttatcggcagtttgctgcgctatgccgcgcatgtcatttcaggagctgtgtttttcggcagctttgctccaaaaggaacaccggtatggatttattctttaacttataatgcgacttacatggttccttcattcattatttgtgcaattgtcctatgtttattatttatgacagcaccccgtttgcttaaaagtgacaaagcgtaaaagtaacaatcccccagcgaattccgctgagggattgttcgttatctgttaagaagtgtttttaaagctgaaagatccggccagccaagacctacttctttcagccttactccggcaatttcaaagttgtcctccgctactctttcaggtgaataggcctgataaaatataattgagggattctgctcaataacccaaacaaacatacttgaaaatccatgttgaagcaaaaactccgctccttttgctaagagcgccctgcctgcaccttgccgctggcgctcttccagaagataaatagcgtataactcgccgtcatagccttcttgttcagagcgaataggtccaaatgaagcaaagccgaatactgaatccatttcgtcctgagcaacaaatactccttttaacgagcgacttttccatttgtcttcaaattccttatagttcaggctgtttaaataatcaatcgggataatttcgtggtatgttgtcctccagctgtctacatgcacttttgcaataccctttatatcctctaacttcgcttcacgtacagttaccatacggttctgtcctttccttactctgatttttggaccgttttggcttctttgatttcatttgttaattcattgatgctttgttttacgtttccttttcctgaaaagttctcaagcatttcttttacatcgattcccgaggatgcttttaaactttcttgcagacttgacattaagttcgtcgcatagctggttactttgtttgctccgcttgattcaccgcttcctcctgtatcgacaacggtgattttatcaatatttgaaagaggtgccgctgcttgtttcgcgtattccggaagcattttgacaatcatatcgaaaatcgccgcctgcccgtactgttcaaaggcggccgcaattttctcttttgcttccgcttctgcaagacctttcaggcggataacctctgcttctgtctctcctttcgctttttccgcttctgcttttgctagcccgtcaattcttactttttccgcctcagcctttgccattgcttcaatactgtacttcttggcatcggcttccgcgagctgtttggctttctcagctgctgcggactgctcaacagaataacggtctgcatcggcttttttctttacctctgagtcgtattgacgttcacggcgaagaatttctttttcttctagttctatttgtttttggcgttcgataattttaacctgcatttcctgctctgtgacttgctggcgcgctcgggcagtctctaaatcatatgcttggtcggcattcgcttttgccgtatcttgttctctgcggaattcagccattttgagctgattgattttttcagcttcagcgatttccgtcgcccgttcaagttctgatttttttgcgtctttatcggcttctgcccgcttaattcgggtttctttatcagcctctgctgttgcgatatcagcatcgcgttttacttgggcaattctcggtttccctaatgattcaagataaccgtttttatcacgaacatctttaatggtaaacgagacgattacaagtcccattttcgcgagatcctgtgaagcgacacgctgcacctcttgagagaatttttctctgtttttatagatttcttctactgtcattgagccgagaatggaacgaaggtggccttctaaaacctcccgcgcttcctgctcacggtcgtcttttgatttccctaaaaattgttcggccgctgtagcgatttctcctatagaaccgccgattttaataatcgcagttccatcggccattactggcactccttgttctgtatagacttcaggtgtcgaaacatcgagtttgcttgataataggcttagcggctctgcctgctggaagacgggaaggacaaaggttcctccgccgcggacgattttaatacggttgccgccttcatcgacatgaacatttttattacccagatagctccctgttacaattaacgcttcatcaggccctgctgtacgatacttcgtaataaacacagctattagtgcaattaataaaaagaatacaactccgatgatcattataatcggcattgtcatatcaaattcctccttttatgttaaatgggttcatgcggagtaaccgaaagaactccgtttttgacatctacgactagcactcttgtgccataaccgatctgttgattttcaaagctgatcgctgacttcgagatggtgccgcctatcccttcaatgaccacttcaccaaacccgtcaacaggaacagctgtaatcactttaccgagtcttcctctgagatcatcttctctatatgccaatgattcttctgcagatgataatggtaccagtacaaagatgtgaagcaataccaccagcatgatcgaaaggatgcaagataaaagcgcaatcagcaagcttgacagaggcaatacgagttcacctatatatccgtccgctgaaaaacatgtgaaaaatgagagcactaatgtcggattaagaaacggaatgccttctggcagccctgcaaatacatctccgaaaaacagaaataacagcgtaaggctgcccgcaataataagcgtataaagataaattgtttgtataggtactccaaataactccaatttcctcatcctttcttcatcaatgcattgatgaacggctgccgttaccattaatacgagacaccccgggaaaagtttcaaaattttaagataagtaacccatttgaagtgctttataaatgataattgcttatatatatggtaatgtcattttaggaggagatatgatgagtatctttaatgaagccagattagaaacgtggaacgaattgaaaggactttctgacgaaaagctgaatcaaaagccttctgctgaagaatggagcatacgggaagttcttgaccatttgaaaaaaatcgatatgaccgcacaaaaaatgttgaaggaacgtgtacaggacgctccgattaaagaaattgaagaaaaaccgcttgaggtagcacaggacagaaataataaacggaaagccccgagtcatcttgagcctgcgcatgattttatttcaggcagccaaatgaaacgtgagcttgatgtggtaagagagcagctgactgctgcgattgcctctctgaaagaagaagattttgaaagagtgcttccgcatcctgtgtttcaagagctgactgtcagacagtggatcgattttatcggccatcatgaaaaacggcacctcagccaaatgaaagaaattaaagaaaagatagaaagggcctgatttaatcagaccctttctgcttttcgtttgacttttcgctgataggaatgaacttctatttcatcacctgtgtaaacagcaccaggtctctccacaatacagacaacccctctaatgcccagtgcgtggcggacgaaagccggcgccagcttcggttggtccggataataagactgaatgacttctcccggctggatacacggatcattttcgccctcacacagcagagccgctccgctcggaaaaataatccggcttccttcttttaatgaagtaagatctggcataccgctgactgccacattcgccccgagccattccggcaaaattctcggcactcccatttttaaagcgatttcgttgcattcctctattgaaacaattgaaatttgtctgcggttgaaaatttcagtccctcttgaaaacattggttctctggctcccgcttttttggtcaggccaaaatgcaagtcgccggggatgccgccataatcaaaatcaagcttgtccatttgctttgttacgaagctttctgtatctgcgatatataagccttccgcttttgcagtcatacgcttccacatcagctggcaccttccttcttatctaaaatttccgcctatgcttcattatcccaaaaaatcccgctctgtaaaggagcgggattttgattataccgttttaggcgtaaggttaaagcagcgcttgtagatccagttgtatgctttttcatttaaatctctagggtttccgaaggtttgcggatctttcattgcttctttagacaagcgttcgatcatatcaggtgatactccctgctcttctaaagtcagcacttctaaatcttcgaccagatcatacatccaattgacagatgctttcgcagcttcttctgttgtcatcttgcttgtatcaataccgaacgctttcgcaatacgcgcaaacttctcaggatagcccttccagttgtattccatgacagggcccatcatcgccgctacacattggccgtgagcgactgggataataccgccaagcgtttggctcatcgcatgagccgcgcccgctgattcacttccgtaagaaaggccggcaagcatcgctgcctgcgccattccgtaccttgcttccagatcctctccgtcagcaaatgccctcttaatgtaatgagcggcatactcaatcgccattagggcaaccgcatccgtgattggctgtgcaaatttcattgtatagcactcaatggcatgggcgagcgcatcaattcccgtcatagctgttacatgcggaggcattgaaacatgaagctcaggatcaatgatggtcaagtgcgctgcaatcagcggaccgcccgtgttgaatttgaattctctttcttcatctgtgataaccgcccattgggttacttctgatcctgttccagctgtagtgggaattgtcgtcagcggaggaatgcggttttccagcggttttttcccatctgccgcttcataatcaagcacgcttccttcgtgagtcgcttctactccgattgcttttgctgtatccatggagcttccgcctccgactgccaccaaaccattacagttctcttttttgtaaagctcagatccttcattcaccagacggacaggcgggtttggctcaactttattaaagagcaccacttcaatgcctgcttctttaagtgattcgattacaggatcagcaacaccggctttataaatccctgggtctgtgacaaggagcgcttttgaaacgcccagtgcagctacttcctcacccgtatgcttgatggctccgattccatgcttaatcacagtcggaatttcaaatgtgtggaatttctgcatgctttctaccttcatatttaatgtcatcatcaatctccccctcttatgaattgaaccagttaaccgctgccggttttgtattacggtatacatgtttgacttctgtgtattcttcaaggcctatttttccaagctcgcgtccgaacccggattgcttatatccgccccatggcgcttgtgcaaagtacggatgaaaatcgttgatccaaacggttcccattctcaagcgggctgctacccgttcgcacttttcaatgtcttttgaccataccgctccagccaagccatagatggtatcattcgcaagctcgattacctcttcttcagagctgaaggtttcgactgtcaatacaggaccgaaaacctcttcctgaacgattctcatgtcagaattacagtttgagaaaatagtaggttcatagaaaaagccgttttgaagctcaggatcttccgggcgtttgcctcctgtctccagcttcgcgccttcctctattccgatctcaacatatttttctacctttgccctgtgctccgccgaaataagcggaccgctttctgtctcagcatgaaaaccgtttccgagttttatgcgttttgcccgtttgaccagctccgccaaaaattgatcatgaatggcatcctcaacaagcaagcgggaacctgcagagcatacttggccggcgtggaaaaatacagcgtttaaggcctgatcaaccgcaacttctaaatccgcgtccttgaaaacaatatttgggtttttcccgccaagttcaagggcgatttttttgacgtttccgcttgccgcccgcatgatttttttgcctgtttcaattccgcccgtaaacgaaatcaaatcgacgtctttgtttacggcaagctcgtcgcccactgtggctcccggtccaaggacaagatttgcgacaccttttggtacaccggcttcttccatcagcttaaagactttgattgtcgtcagcggcgtaatctcactcggcttcatgacgattgtgtttcctgcagccagtgcaggggcgattttccagctcgcttgaaggagcggataattccatggagtgatctggccgcaaaccccgattggctctctaataattttgctttctgaatcaggaatcggagatgaaatgatctctcctccatctttgtctgccaagccggcgtaatattgaaaaacattggcgatatcgtccatatcggccttgctttcttcgagtgtttttcctgtatcaagagattcaagctcagccagctcctcaagatcgcgtctgattaattccgcaattttcagaacaatttttccgcgttcaagcccggatagcgatgaccattctcctttgtcaaatgctctgcgtgcggctgcgattgctttgatggcgtcctctcgccctccctcgcttacagttgcaatttcttcttgattaaatggattgataatactgcggatctgttctttttcggcactgatccattctccgtcaatgaataatgtttgactcatataagcctccttgacgtaaataaagtttgttaaataaaaatttaatgtttttaacaaccttaatctaacatatggtttttaaactgtcaaagtcccattttgatttttctttttgacttttcctcatgtttcgttaagataaagaacataaagaaataacttaacgaatttaattttctaaaggaaaagagggtcagtatggatgaaaatccagaatttgcagctatagaacaggctcgggatcttgttattgactccattgctgaaacgatggatctttacggaattacccgcagtgtcgggattttatatgggacgatgtatatgagggatgagatgacgcttgacgaaatgcgtgaggagttgcaaatgagcaaaccaagcatgagcacaggcgtcaaaaagcttcaagacttaaatgtagtgaaaaaaacatttcaccggggcatccgtaagcatacatttgtggctgagaaggatttctttaaatttttcacaaatttctttccacctaaatgggagcgggaggttcaagtgaatgtagcagcgatcgaggaagctcaagctgatttacaaaaggttttatgcaaggaagatctcgatgaggatatcaaaaatgaagcactgcagttatatgatcagctggaaagctctaaagcttactatgactggctgaaacggcttgctgaatcggtgcagaccggagaaatttttaaatttataccgatcgaaacaaagtaaagcagaaaacgcctgggaaagcaggcgtttttttgatgtaactactacaaatttgaaaaatacgggaaaaacaccccatttacttccaaaatatttgatggtaattttatgtaggtaaaatttgtatttggcctttcagaggaggtgaaaagcgggcaggcctgtttaatttatcattttttagggggaattttgttatgaaacgcaaattattatcttctttggcaattagtgcattaagtctcgggttactcgtttctgcacctacagcttctttcgcggctgaatctacatcaactaaagctcatactgaatctactatgagaacacagtctacagcttcattgttcgcaacaatcactggcgccagcaaaacggaatggtctttctcagatatcgaattgacttaccgtccaaacacgcttctcagccttggcgttatggagtttacattgccaagcggatttactgcaaacacgaaagacacattgaacggaaatgccttgcgtacaacacagatcctcaataacgggaaaacagtaagagttcctttggcacttgatttgttaggagctggcgaatttaaattaaaactgaataacaaaacacttcctgccgcaggtacatatactttccgtgcagagaataaatcattaagcatcggaaataaattttacgcagaagccagcattgacgtggctaagcgcagcactcctccgactcagccttgcggttgcaactaatgtaaaagaccggttaacgccggtcttttttgcgttttaccctcccctttttctctaattcccgttatcttttttctggtttaaaatttaaattgacaaacactagaaacaggagtaaattcttgagtgttcaatttcatacagtctcttttaccgcttaatcaaacacgaacgggggaaccaacgattggctgttttattaacagccttggggtgaatcttactaagtaagagggggtactctgaatccctaatccgacagctaacctcgtaggcgtatacagagaggaggtctattatttggccattctttgcaatggtcttttttgcttcagaaacgttaattcactaagggagatatgaacattgggaagaattaaaaataagcaatttgccgtgatcggtctgggccggtttggcggcagcatttgtaaagaacttcatagaatggggcatgaggtccttgcggttgatatcaacgaagaaaaggtcaatgcatatgcttcttacgccactcatgcggtaattgccaacgccaccgaagaaaacgaattgctttcattaggaatacgcaattttgaatatgtgattgttgccatcggagcaaatattcaagcgagtacgctgaccaccctattattaaaggagcttgatattccaaatatttgggtgaaggctcaaaactattatcatcacaaggtgcttgaaaaaatcggcgctgaccggattattcatcctgaaaaagatatgggagttaaaatcgcacaaagcctttcagacgaaaatgttttgaattacattgatctatctgatgaatacagtattgtcgagctgctggctacgcgcaagcttgattcaaaatcgattattgacctgaatgtaagagcaaagtacggctgcacgatcctggccatcaaacatcatggagatatctgtctttcccccgcgcctgaagacatcattcacgagcaagattgcctggtgatcatgggccacaaaaaggatattaaacgttttgaaaacgaagggatgtagacaaaggtgacacttcaaaaggataaagtgatcaaatgggttcggtttacaccgcctcaagtgcttgccattggttttttccttaccattatcatcggggctgtcctattaatgcttccgatttccactacgaagccattgtcatggatagatgctctttttactgcggcttccgctacaactgttacagggcttgctgttgtcgataccggtactcaatttacggtattcgggcaaacagttattatggggctgattcagattggcgggcttggatttatgacgtttgcggtcttgatcgtcatgatattaggaaaaaaaatcggattaaaagaacgaatgctcgtccaggaagccttaaaccagccgacaatcggcggtgtcattggccttgtcaaagtcctgtttctgttttcgatcagtattgaattgatagcagcactcattttatccatccggcttgtacctcagtacggctggtcatccggcttgtttgcaagtttgtttcacgcaatatctgcttttaacaatgccgggttttcgttgtggcctgataatttgatgagctacgttggcgatcctacagtaaacctcgtgattactttcttatttattacaggagggatcggatttacggttctgtttgatgtgatgaaaaatcggcgttttaaagctttttctttacatacaaagctcatgcttacaggaacgctgatgttgaatgcgattgctatgcttacggtctttattttagaatacagcaaccccggcacgctcggccacctgcatatagtcgataaactgtgggcgtcctattttcaggcagtgacgccgagaaccgcaggcttcaattctctagattttggaagcatgagagaaggaacaattgtatttactttattattgatgtttatcggagcaggaagcgcatcaacggcgagcggcattaagctgactacgttcatcgtgattttaacatctgttattgcttacttgagaggtaaaaaagaaacggttattttccgccgttccatcaaatatccgattatcattaaagctttagctgtgagcgtcaccagtttgttcatcgtgtttttagggattttcgccctgacgatcacagaacaagcgccatttcttcaaattgtgtttgaaaccttttccgcattcggaactgtcggccttacgatggggcttactcctgaactgacaacagctggcaagtgtatcattattgtcatcatgtttatcggaagaattggtcctttaacgttcgtgttttcattcgcaaaaacagagcaatcaaatatccgttaccctgatggcgaagtgtttacagggtgatatcaaaaaaatccggcgtgcagtcgccggatttttttatgattcgatatgagattgattttgtcttttttcctgttccgcgatgatttcattatcctccgcgttatcacgggttactttttgtgtaagaatcgcaccaactgctacaagtatcataacagcgatgtaataacctttttcattgagttccaggttatcagcattatagagtccgatactaaacaaaaatactcccgcaaaaaaagtaaaataagctaatactgtaaaggcaaccgtgtttctgcgtctatatttctgcacctttgttccctcccgaaagcatagttaaaaagtgataacttccgtggaatattatacctcaaattccccgtaatggaacaaagaattaaaaataccagtaaaaagggcttaggttgcctcctttatttcaacagctgaatcatcaatccagccgataagtttatcattgatttggaattggtaccatacagactggcctttctgttttttagacacaacctttatgtctttgccgacgtaagattgggcagaggtaagccttatggaccgatcatcagtagagggcttggaccatacgtcttgaacggcactgtctttaatagaggcgtttaaatccacagatttgagggatggatttacctcatcgtactcatctaaatcgtatttttccacaatagcgctgattttgtcagcgtagtcagggtctgtagcatatcctgatgtttgcagggcggttgccgcttccttataattccctgcctcaagcaccggtttatacttctttttattccacgatgtgccacgaacgaacaattgggcgtgatcatccatagattcaaaaaacgtgctgtattttcgaaacttcgcgcgaatggtttttcttttccctttttcaacttcgtccgtttccatcgtgacatgatggcctttataattcccttttacgccaaaaaggttgttggccttagcagccagttcactgttcccccagtccgattcgagaatggcctgagcaattgtgatgctggggagaacatggtatttttcatacaaaatttgggcatgtccggacagactgtctataaatacttgctgttcatcgatttcttcagtttctttggatatttcaatcggttttgataaagttgtcgctaaaacaaacagagctagcggaatcgatacaaggaaaaatagtgaaatcaagagtttacgttttttaagttttttacgggccatgaaaaccttccttcgaattaaaagattacgaatgtaaaagaatctaccttttagaattttacttgcacttctaatatttttcaattctttagggataaagttgggaaaagattgcaaaataaaaaccttttcgctcaatgaaaaggtttttaccatgtttctatttttgtaaatttctgagtgcattacgatattccgtatcatttattactttatatgatttgacagttgccttcgacaaaccttctgctgaaacggccggtttttccggagctgttttcgctttatcatgtggtttatgtgccagcttgtgccccattccagtggcattcatacaaaatgacaggcagacgagcagcacgctaaggataaaagaaatgaagaagagatcatgataagcagtcatcatagaatcctgttccgaaccgctttgtctggcagcatcttttttcgtgaaaaagccgatgagaatgggaactcccatatagacaaacaatcttaaaaactgaacagctgtcattctcttgaccaaatcaggcagcgggcctcccatggcagctcccatcagccctgcggcgactgtcaggcctgttcccgctgcaagcatgataaacagtgccgcgaacatataaagagatgatcgatcctgtatatgcagccattgaaaattcacaaaaacgagaatgagtccgccgataataccgagcatccctggtccgactttatcatataacagagcgcttaaaatggccgcgatcgccactccgattaaaagagtcaagtttaaaaaaatgagatgctcctgagaaatatcatacatttgacggagcaagccttgaaaagcagacaggctgacagctaccgttatcgtccctgcagctatgatcaataagccaagcaccggttttggcagcagcatcagtttaatagatatgaaggggtttttcactttatattccacaatcaatagaccaatgagcaaacataacgtcaccccgaaaccaatccatacataacccgatgacagcccccatttttgcagaaaaatgaatgaaaccgctgaggctgcggcaaggaagacagataaaagaattcccgcacgatcaagcggctgttcttgatccgccgctccgtgatgctcatcatgaagaaagaaatagctcaccgcgacaccgatcagggacaaggtgccaaagatgataaacagccatctccaatgcccgcagcttgttgcaatggttcccaggattgtaccgatgataacagaaccatagaatcccccgatcagcacaagcagtgcatagttcctgcgttcaatcgggaatgacagtacaagcattggaatcataatcatcagcatgacgcctgttgccgccccctgtaaaaagcgccctgccgccatccatgcaatatcgcctgaacatgcgatgagcagtgagcctagtataaagacaggtaatgaagccagatagacgggacgcgcaccgaattttttcctcagcagcggtcctgccggaactaacaaggcaaaggccatattgccgatcaatatcgggtttactaatgtgaagacacttgttccaaccgctttctgaacaaggccttgaactgacgacaatgccgtgttagacatcaatcccggcccgaccgctaagacggcgagcaaagaaatcacccaatagtgttttgtcttcatgttgtcattccttcctatatgaatacatgcgaaacacatcattttttgaaaacaaaagaagctaatagattttgcataccattagctttcattctaatattctccctttcaggggaaatgatattattttattataattatgtgaatgaatgagcatataatcaaatattatttcaaatcgattgtgttttgtcaatggagtaaatttcaagcacaacatagaaagcttgaaagcttttccccgatattgtgtctagaactgcacttatgaatccctgctcgttccctcaagcgaattaaagcaggccgttttaatcctttcaatccactattcccactaataaactcgaataagttggtgataagacaacattttgcccccacatttttttgtgttcactgggcgtttgccgcctctaaattgtatatgggtaaataccatgaattaacctatgaaataccaatgtaaggaaattctaaatattccgggaggcaaaaacgaatggaactgtatgagtgtatccaagacatttttagcggcttgaaaaatccatcggttaaagatttagcaacgtctttaaaaaaaattccaaacgcagcaaaattaagtcaaccgtatattaaggaaccagaccagtacgcttacggccgaaatgccatctatcgaaataatgaattggaaattatcgtgattaacattccgccaaacaaggagacaacagtccacgatcatggtcaatccattggttgtgcaatggtgttagaaggaaagcttcttaattctatttatcgctcagccggcgaacacgcagaactctccaattcatactttgtccacgaaggagaatgccttatttcaaccaaaggtttaattcacaaaatgtctaatcccacatccgaacgaatggtgtctcttcatgtctactcccctcctttggaagacatgacggtctttgaggaacaaaaggaggtattggaaaattcatgattgacagataaactgctcactttgacttcgctcaactggaggattcagagaatgaatcttttcctcaaaacaaaaaaacccttatagaataagggtttacaggtatggagccaagggggctcgaacccctgacctctacgctgccagcgtagcgctctcccagctgagctatggccccgtatgtaatgtcatgtttattatagatgattttattttgaaaaacaagctgtttcctcttgaattgacagaaaaaataaggctcgtaaaagagccttattttcgacttacatcatgatcaaaagtaaaatcacaccgagaataattcgatagattgcaaatgggacaagtttgattttgttaatcagccttaagaagaaacggacgacaaacagtgcgacaacaaaggcacagataaagccgacgatgaaaaatggcatcagatccgagcttaagctgtcccaatgcttcacgaggcttagaaagctggctcccatcatgatcggcatcgccataataaacgtaaagtcggctgcagctcggtggtttaatccgagaataacaccgccggaaatggttgaacccgaacgcgagaaacccggccaaagggcaagacattggaataagccgacggctatcgcctgtttataggaaatgcggtcgagtgtgtctgtcgctgttttccgtttattgacccagtcagcaaaaagcatgaggattgccccggcaattaaaccgatggccacagttttaacggaaaataaatattcatcaatgtaatcttcaaacaaaaagccgagaacagctgcaggcacgagtccgacggcaatttgggcaatgcttaatttatgtccctgctcctggtcgcttgtaatattttttttcaagcccagtaagtttaaaattcggtctttaaacacgatagctactgctaaaatggagcctagctgaataaccaccttgaatgagttagcagcttcttctgacatcagattacttgatttaagccagatgtcgtctactataatcatatgtcctgtcgaagaaaccggcgcgtactctgttaatccttctacgattcctaaaatggcggctacaaacaattcccatagagtcatgattttgattctccccattagacatttatttttttacataacgggagcttcccataaatggaaagcccgtcttatataactataaacgaaaatcacactttatgccccggcgtattttcatttttttcttcatcgtataaatgtgaccgcattttaaaccagtcaaataaatgtgtcgtaatgactttggcaaccgcatagccgggaatcgcaagaatgattccaacaacgccgaacagcttgccggctgttaacagcagaaaaataatcgtaatcggatggatgtgaaggttttttcccataatttgcggagagatcagcttcccttcaatcagctgaacaatcgtccaaacgatcaccagcttaagcagcatgagcggcgatgtcactatggcaatgataatcgcaggcgtaatggcaatcgttggccctaaatatggaacgatgcttgtgcaagccgcaatgactgcaagcaatgaagcataatccagcccgataatcaaataaccgataaacagcaaaaacccgatacagaagctgacaatgatctggcctctgatataagagcttaaccgatgattcatttcgcttaagactgtgtatgtctgttctttcaattgcgtcggaacaaacttcagtatgtagaccggcaatttttttccgtcctttaacaaatagaaaaggataaacggaaccgtaacgattgaaatgataatctcagtcagggcgccgataaaattcccaacgccggtaaaggtactgttcacaattgtcgctgcctgatctgaaacctttgttgcgagatcagatatattgatgttcgtcgtttgctgggcctgattgacgaagttgctgccgatcagctgtttcgtctgattttcaacgatatccacatatcttgggatgttgtcgattaaactcataatttgttcttttaagaagggaatgatcgacacgattgtgatcgtgatcagcccgataaccaatagatatagcagcaatatagaatagattcttcttattcttcttctctcaaggaaatcgacgaccgggtttaacagataaaaaacaatgcctgtcaaaataatcggaagtgatatcgttttgagcaaaacaataatcggggtgaaaataaatgatgtttttgtaaatactagaatatttaaaccaatcagcagcagcacaagcaaaaataaaacaaacttattatccaagaagaatcgcttgaatctgccgctccatgtttgcaacgtctccactatcgttcctccgtcatacatagtttaattaaattgtacactatcgtccctataatgaaaaataaaaaccgttaattgctggaaaagctttcacggttttaacattctatttatatctatcatgtgattttgttctttttaagctataatttagctatatcatgcaaaaggagcgatacgagtgatacgttttgcaataataggaaccaactggattacagaccgctttcttgagtcagcagcggatatcgaagattttcagctgactgctgtttattcaagatcggctgaacgcgctggcgagtttgctgctaaacacaacgctgcgcatgccttctcagaccttcaggaaatggcggcgagcgattgctttgatgccgtatacatagcgagcccgaacgctcttcacaaggaacaagccgttctctttatgaaccatggcaagcatgtgctttgtgagaagccgtttgcttcgaatacaaaagaaacagaagagatgatctcagcggctaaggcaaacggcgttgttctcatggaagcaatgaagaccactttcctgccgaatttcaaagagctgaaaaaacacctgcataaaatcggcactgtccgcagatttaccgcaagctactgccagtattcctcacggtatgacgcgttcagaagcggaactgttttgaatgcgtttcagcctgagctttccaatgggtcattaatggatattggcgtctattgtatttatccggctgttgtgttgtttggcgcgccgaaggatgtaaaagcaaacggatatgctttatcctccggagtggacggagaaggaactgtcattctgtcttacgacgggttcgaagctgttctgatgcattccaaaatctctacttcctatgccccggctgaaatccagggtgaagacgggacgattgtaatcgatacgattcaccggcctgaacgtgttgaaatccgctaccgggacggccgccttgaaaacatcgcgatccctgatcctaaaccagcgatgttctatgaagcagaagaatttgtcacgctcataaaagagaataagctggaatctgaagaaaatacatttgaacggtctttgaccactgcaaagattatggaagaagcaagaaagcaaatggggattgtataccctgctgatcaagcttaaaaaaatccgcccgcgtgcaaatgccgcggcggattttttattaggcaatcggagaagatgccttcctttttaaaagcacctgttgctcatattctttgatgtcatgaagccatgcctcttttaccggaacgcccatttgctcacagtaggaatcccagatggctccgaaaggatatgttttgaattcctccatcagggccagcctttctgtatagcggccctcttcctgcaattgttttaaatatccgttcgggagaagcagggcatacaataaagctttgatcatatttctcgttccgatggtccaggcggctacacggttaatgctggcatcgaaaaaatccagaccgatggcgaccttctcaagagcatgatttcgtacaatttcaagagcgatttctctcaattcatcatccaaaaccactacatggtcgctatcccaacgaacaggccgcgatacgtgcaaggcaagcttgtctgtgtaaagcagcatggacgagatcttgtttgataccgtctcagtcggatggaaatggcctgtatcaagtaaacaaagcttatgattcgtcaaagcataagctaaataaaattcatgagatccgacaacatatgattcggagccaagcccgaacagcttgctctcgattgcatcaagattgtgttgttcactgatctcctctgcgaagatccgatccagtgattcttttagtcttttacgcggtgtcagcctatcactcgggatatccttatagccgtcgggaatccaaatattcgtcaagcaaggtgttcctaattctttcccgaagtattccccgatacggcggcaagcgatgcaatgcctgatccaaaattctctgatatccggatcagggtgtgaaagggtgagtccgtcagccgctttctcatgcgaaaacaaggttggattaaaatctaaaccgagaccaaggttttttgcccatttcacccagttttcaaaatgctgcggcttcaattcgtcacgttctaccgcttccctgtttgtttctgcgtatatcgcatgcaggtttacgcggtgctttccaggaatgagagaaagagccttctccaaatctcttcttaattcttcaggagtttgcgcttttccgggataattgccagtcacgtcaattccgcctgaaagctcgcccttatttacttcaaagccttcaatgtcgtcaccctgccagcaatggatcgaaatgggcacttgctctaattgccgaagcgcctcttcaacatcaattccccatttttcatatgcctgttttgcactgtcataattggcttttatggtcatacggctctctccctttatcagttttttaatccaaataaaaaacttcctttagatctatcgaaacaggactgaaatccgaatttgttttcattaatggcgccatcgatttccaccatcttcggcaaacttccgtgtccgccatctttctccatttctcttcatcctctatttctaaatatgcaaaaagcctgcctgtttcctcgtctagaaaaatggaataatggtgtgctccatgagctttgagtgcttctgccatctcaggccaaatgtcatcatgccgctgtttgtattcttcgtacttgtcttgatggacaaacatgatactggcttttcttttcaaaccttttcacctcttcatcatttagatagcgctttcaaaacagtttgctgaaatgactgaatgatcgtgcttctgtcaatgtctttaggtgtaaacactttgatcggaaaggaatttctgacgacttgccgggcttcttttatgtctttgacttctttggcagcaatcatttgcatcaaaagatttccggtggcagttgcctctatcggccctgcatataccgcttttccactcatgtctgccgttaattgatttaagaaatcattccgggctccgccgccgatgatatgaaattgctcgatcggtttttctgtgattgtttcgagctctttgatggctatcgcatagatgatggctaaattgctgtagatgcagcaggcaagttcgcctgcagtgcgaggagtcttttggcgggtttgtctgcaataatgttgtatttcctttatcatgttttctggattcaggaaacgtttatcatttaagtttataaattgctggaatggttctgtttttttggcttcttctgcaagctgctggaaagagtaatctgcttgtaactgttgtctgacttcttgtatcacccacatgccgataatgtttttgagaaagcgaatggtgttgtttgcgccgcgttcatttgtatagttgttttctaaagcaagatcagttattatcggtgttttgttttcaaccccgattaacgaccatgttccgctgctgatatacgcccagccatcatttattcctggcgctgcaatgacggccgaggccgtatcatgtgttgcgactgtcatcaccttgcacgccgggagatcataatccgggaaccactcatttcttagcttcccgagttcacaccccggttcagtcagcggggcaaattgctgttcctgaacggacacggcttcaagcaattcaggatcaagatttcccgttgaggcttttaaaagctgtgttgtggacgcatttgtgatttccgttacagcttttccggttaaacaatagcctaaataatcaggaatcatcataattttgtctgtctttatcagcagctcacggtcttcctcatacaattgatagatcgtgttgaaaggctgaaattgtattcctgttttttgataaattgcggcttttgagagggtatgttccagtttgtctattgtgtgatctgttcttctatcacggtaggagattgcttcccgcaaccgatcgcctttttcgtccagtaagacataatcaactgcccatgtatcaatgcctacggtgcagtgttcatacccaagcgtctttactttttgcagtccttgcaggatttgttttagcaaatgatcaatatcccaaaagcaatgcccgtctctttgactgaaaccgttagcgaacctgtgaatctcttgtatgtcaagcttcccttcattcagttcacctaccatgattctcccgcttgatgcgcctatatcaatggcagtataaatcatcctttcaccctctcttcgaaagaggaacagctgtcaccttcacctttttgtcctcaagagcttttaccgatgccggatcaagtccagaatccgtaataaggcggctgacatcttgcagcgaggcaatatgtgaaaactcgcggttcccccatttgcttgaatcggccatcaaaatggtctggtccgacctttcgatcatccgttttttgagcagcgcctgccactcatttgaatcactcatcccgttgtgtacgtcaaatcccttacatgacagaaaggttttattgacatgataggtctcaagtgaacgctctgctaacggaccggcaaatgataatgatttttccagcaaaatgccgcctgttgaaatgactgatatgttttctttattgctgagttcaatagctgctttcattgagtttgtaatcacggtgagctcaatgtcagggagtatttttgccatgtaccaagcggttgtgcttgcatcgagaatgattcggtctccgctttttacatatttggccgcttcgtgagcgatggcttttttttcgatgacattcgtgatttcccgttcagaaaaatgaatttctgattccttctgctgaatactgaccgctcctccgtggctccggctcagtttatgttctttttcaagcttttcaagatcacgccgaatggtttcctctgtgactgaaaatatgtcacttaattcggaaacgcggatgcttgaacgcatatttactatttccactattttttgctgccgttctgctactagcatcggtaacgcccttcctcatatcgtagtccgtcttatattttttatcatagcatatttctaacgcgtaaaagcagcagggacgccgccgtctaccgtgatcatgcagcccgttgttttttcggctttggaagaagcgaagaatgcaatggcttcggcaatatcctccgggtaaatattgacgagcaatgctgtccgtttccggtaatgttcctccagctgatccggttcaatcccgtacgccgcggctcgttcctcccgccagcttgaaccccagattgccgatccttgaagaaccgcatcaggcaaaacagagttgaccctaatgccgaattctccaccttctgcagcaatgcatcttgctaaatgggtttcaagcgccttaaccgagctgtaggcagaggcgtttttgcccgcataaaccgaatttttcgatccgacaaataccatgcttccgcctctattttggtgtttcatctgtttaaacgcttcacgggctacaaggaaatagcctgttcctaaaacattcatattaagattccattcttttagacttgtttcgtcaaatgggcttgatgtggccagcccggcattattgacgacgatatcaatgccgccgtaagcaagcgccgctcgttcaaaagctgattgtacgtcttcctcctttgtcacatccattttgacagccattgcccgtccttctccgtatgcatcgtttatttccccggcaattttctgtgcaccttctatattcagatcagctacgatcacgtgccctccctcagctgcaaatcggcggcatgctgcactgccgattccgccggctcctccagttatcaacgctacttttcgggaaaattctgcttccggcggggccagcgtgagtttatatagttcgagcggccaatattcgacatggtaggattcattttcatgtaaagaaacaaattgccccagagcggttgctcctttcatcacggcgatggccctccgatataaagccccgcttactttagacatggcataactttttcctgtattcaccattccgattcccggaatcaatatcacccgtggggaggattcaaagatttgatccccatcctgctgatttcgtgtaaagtaagcctgatactctgatgtaaaggtctcgactcctgacttgatcagatctgcaagcttgtgcacatcttgagtttccggattccaatcaatgtacagcggaacccgttttgtgtgaacaaggtgatccgggcatgccgcaccgatttgcgaaagtgctggcgcttggacactgtttacaaattccaagacatcgtcatgatcatcataggaaaggatcattttcttttcttcacttactgctcctctgatcacaggcatgatgcctgccaagatttgttttcttttatcctccggcagcggctgataccttttgcctccgaatacctcatgctgattgatacgatcgttaacatactgctcggcttcttgaatgatggatatcgttttttgataacatgtttcagacgtctctccccaagtgactaagccgtgtttctccattaatataagctcggcgtggggattgtttgctacgccttcagcgatcattttagacaaagtaaatccaggacggacgtatggcacccatacaaaccgatttccgtaaatgtcttcagcgatttgttttccattatccgcacagcatatgctgataatcgcatctggatgggtatggtcaacatgtttgtatggcagaaaagcgtgtaatagcgtttcaattgaagggcggggatgtttgctgtctatcatacaatgagacaggtagtctaccatttcttcatctggcatttggtcccttttaatcagcgggcggatatcatctaatttcaaaccggtaaagttatgcgctttcattgttgccaaatccgaaccgcttccttttacccacatgacttctatttcacggcctctaaaatccttttccgttgttttcatagatgtattccccccgccccagttgcagacagtgcggtctgacccgatcagattggacctgtacaccaattcctctacacctttaggcagccgtgcagctcgctctgaatcccatatatgtttcgccatatttgatattcctccatccccttttatttgtatccgttttcattatatatgatttctgtttgtttttgaattgtttttgtttatttttgcttttaacaaaaaagaaagcagcagatatgccgctttcttgtttcattatgattctattttaaatttcttcgtaatgtcctgaagttcttccgccatgtttgccaacgtttccgctgaagagctgatttcttccatggacgcaagctgttcttccgccgaagctgcgatatcctgaatgcctgctgagctttctttcgccactgcagaaatatcttcaacagcacttgacacttcctgtgatccggctgacagttgttcaaccgtcgcgttcaagttttgcaattcgccggaaatttgggttgtcatctcatagatttgtttaaagctttccgctgtttgatccgtaatctgcaagccttctttcacttcatgattcacggattggaacattgaaagtgaggtgctgatttccctgacaatctcttgaattaatccttcaatttccttggcggagtctgctgattgtacagcaagttttctaacctcttccgcaactactgagaaacctcttccgtattctcccgctcttgccgcctcaatcgcagcatttaatgcaagcaggttggtttgatcagcaatgccattaatcacattcaagatgcttgtgatatcttgcgattttgtttcaaggcccttcacaaccgcttccgctttttgaacggattggtcaattgttttcatctggccgactgtatgctccaccagcttttctccgctgcccgctgcctcagaggactgaatcgatgatttcgtaatggttgaagaggcctgagccacttttgaaatcccctcgttcatttgagaaagatgatttgagcttgtttccagtttctcgctttgtgcctcgttgccatctgagaattgttcgatggcaagtgtaatatgttcagttgccttgctcgtttgggctgcgcttgccgtcagctcctcagaagatgaagcaacgttttctacagacgtttgaataacgccgattacagaacgcaatgatgcagacatttcattaaagctttcgccaagctggccaaactcgtttttcgagtgaatgtcaatgacttctgtgagatctccactgctgatttttgcagacgttgagacaagttttcttaacggcttggtgatggcacggataatatagagaatgagtatgccgccgattacaattgacacgcatagaatgataaccgcagtgttcagcaccggacttgaagcatcttgcaattcactgacaaaatatgtgcctgcgattttccagccagtcagtttatttgtcgtaaaggccattttcttttctttgccttcgaatatatattcaaatgagccttcttttttggaatatacttggtttgtccaatcgccggatccggttgtccccggcttaattgtcggatgggcgatatattttttgttgccagtcgtaataaatgcaaagccttctttaccgattttgattctttgtgatgcagtaagcacttcatccaggtttaaatcaagcgctataacccctgaaccgtcttttaattgttttgaaattgtgacaacgatatctcctgtcgcttcatcagtatacggttctgagaaaacagcttgtcctttttccgcaaccgcctgtttgtaccagtcacgtcctgtcggatcgaaacctttcggaacaccgctatccggatatttataaagcttcttatcttctgaagcagcatagattgcgcctacatcgtcgttaagtgtcgtgtactgcttaaatttctctttcagtaatgttttgtttttgcctaacaatatgtctttatcgactgtctcactataataatctattgcttttactttatcttctaatttattttgcagcgtactgtttagttcttcaacatttcccttcgcactgtttatgagctctctgtctaacgcgttccaagctgattgataactgaaatatgctaaaaccccaaccggcaaaataagcactgccagaaacgcagcgattagcggtttgctgatcgatggctgtttgatccaatgtatgaattttcccattcttgttgactcctcctttaagataaatctaatatcgtcaaactaggataaaaggtttaataaaaaaactaaaaaaaacacccaagcgtaacaagcttgggtgttaaggcttattattcgattttgaatcgtttggtcatatcgcgaagctcttccgccatagacgaaagggtctctgcagacgagctgatttcttccatggaagcaagctgctcttcggctgacgccgcgatatcttgtatatgcgctgaactttcttttgaaatcgatgcaatgtgctcagacgctcccgaaacttcttcggagctggcagaaagctgctgaaccgtcgcactcatattttgcagttcgccggcgatttggttcgtcatttcagaaatgcgtttgaagctcatttctgttttatctgtgatgtcaagtcctgtctgcacctcttgattgacagattggaacatgccgagtgatgtattgatttccttcacaatttcgatgattaatccttcaatctcttttgctgaatctgctgactgtactgccagttttcttacttcttccgctacaacggagaagccgcggccgtactcgcctgcgcgcgctgcttcaattgctgcgtttaaggcaagcaggttcgtctggtctgcgatgccattgatcacacgcaaaatgtttgtaatatctttcgatttcgtttccaatccgcgtacgacttgctccgcttctttaacggacttgtcaatgacattcatttggccgacggtttgatgaacaagcttgccgccttcacttgcaatttctgtcgattgaacagatgaatcagtgatcacttcagaagcttgagccatattcgtcaacccgtcattcatttgataaatgtgctctgctgccgtttcaatgttttcgttttgtttttcattgccgttagaaaattgttcaatcgccaatgtaatgtgctctgttgccttgctcgtttgcgcagctgatgcagtgagctcctcagaggaagcggcaacattatctacggaatcctggatggcgtgtatgagagaacgaagtgacgacgccatattgttaaagcttttgccaagctcgcccaattcatcttttgaacggatatcaatggtttccgtcaaatctccctcgctgatccgcttagaggaaccgacaagctgtttcagcggtgttgtaatcgaccgaatgatcaaagtcatgacgataatccctatgataatagctgcggccaagacaattaaagcaaggtgtaggacaggctgggctgcctcatggatttcatccaaatacatggtgccgccgatcttccatcccgtcaacttgtttgtgtcaaaggccatttttttcttatcgccatccatggtgtattgaaaatcgcctttatcagcactcaacatcttatcgagccagtcgccttttaattcagttcctgatttttcattaggatgagcgacaacttttttgtccttcgtcatgataaatgcgtagccttgtgtgccgatgttgacttttttggttgttttcagcagattttcaatggtcatgttgattgcgataacgcctgaaccatcttttgtctgctgggcgattgtcacaaccatcgtatttgtcgacgcggttttataagggtctgtgatcacgactttccctttatttgcaaccgcttttttgtaccagtcgcgttcaaccggattgtagccgcttggcatcggaagatccggatagcgggtaaagtgcccttttgtgtcacttgtataaatggattctacatccttgttaatgctgatatattgtgagaatttctctgcaatgcttgcattgctttttgcattgtatttctcttttgtcagccattcgctgaaataatcagcactgttttctttttcgccgatgctggtgttaatgatttcgtttaattgctgtacattttccaatgcgctccccatcatctgtctgtcgagtgagctgctagccgattgataggcaaagatcgccaatataacaaccggtatgatgaggatcgacagaaaggaaacaagaagcttccgtgtaattgatctttgttttatgagttggagtatttttttcatcattcatttctccttttttatgctacccttcatatcggctggaaatgggtaaatatatacagcaaaaaagaagaaatttaacaaaagtaactaatttcccataaataaatagtattttagacctattatttatctactttaaattgttttgtcagatcacggagttcttcagacattctttcaagcgtcagtgcagatgaactaatctcctccatggatgccagctgttcctcagctgaagcggcgatatcttggatgccatccgagctttccttagaaatggcagtgatatcatttgaagctgcggaaatttcttgagctcccgatgacagctcctcaaccgtcgcattcatgttttgcagctcggaagcaatttgattggtcatttgcgatatatgtttgaagctctgtttagtttcatccgtcatgacaagccctgtttcaacttctttgtttacggactgaagcacgttcagtgatgtgtgaatttcttttactatttcactgatcagcgattcaatttcttttgctgagtcagccgactgtaccgcgagctttctcacttcctcagcgacgactgaaaagccccggccatattcacccgctctggccgcttcaatggcggcatttaaagccaaaagattggtttgatccgcaatgccgttgatgacacgcaaaatattcgtgatatcctttgatttgatctccagccctttcaccacttgttccgctgattttacagaatggtcaattgtgttcatttggccggctgttttctggacgagtgtctcccctttacttgacacttctgttgaatctgcggatgtttctgtaatcactgctgcagcccgcgccagctctgccaatccgtcattcatttcattaatttgttcggttgtcgtttctattttctcgctttggctttcactgccgtttgaaaattgctcgatagccatcgtaatgtgctcagtggctctgcttgtctggtctgccgatgcagtcagctcttcagacgatgaggcaacgtgttctactgagtctttgatcccgtgaatgagcgagcgaagcgagtgtgccatatgattgaagctctcgctcagaacgccgagttcatcttttgaattgatttcaatcgtttcggttagatcgccttcactaattttttcagcggatgcgacaatgcgtctcaatggctttgtgatggatcgaatcacaaaataaatcgccgtcattccagctgcgatggcaatcgccagaacgattgaagccatgatcagaaccctgcttgcagcatcgtgaatctcgtttgcatacatcgtgccgctgattttccagcctgttgtttcgcttgttgcaaatgccatttttttctttttgcctttgtacgtatattcaaagtccccgcttttatccttgtagagcttatcaacccagtccccttttagctctgttcccgctttttctccggagtaggcgatgactttcttgttttggctcaaaataaaagcatagccttcttttccgatattgattcctttcgcggtagtgactaagtcatcaattttcatatcaatggcgacaacacctgacccatccaccgtttgacgggcgatggtgacgaccatttttcctgatgaaatcgattcataaggctcagtgacaattgttttgcctttattggccattgcttctttgtaccaatctcgttccaaagcattaaagtcacttggcatgtcagcgtacggataacgggtgaattccccgtctttgccgcttgaaaataccgcagcgacattatcattcatttggataaattgtttaaattcctgtttcagctctgttttctttttatcctgaaatttttcttctgtagcccaatcgctgaaatatgcgaggcttttttcagtcgtgctgattttatcatcaatgatgtgatctaatatctgaacattttcctttgcgctttgcgtcatctgtacatcaagtgaggcaactgctgattgataagcgctaaccgaaagggcggttatcggaacaattaagatcagcaggaaagaaataataagtctccttgcaattgatgatctgcgaatagtggtgagtgtttttttcatttccttttgaaccttctttcaataatttacaaattatatcggcggatcttcctttaaattacattgaaaatggaggaaaaaatgaaaaatagttctaaattcacctgttaaactaggactttattattgtttaccatataaaaaacagcgctttgatagcgctgtttttcggcttttactcgattttaaattgtttcgtcagatcacgaagctcttctgccatctgcgcaagagtggtcgctgaggaactgatttcttccatggaagcaagctgttcttcagctgatgcggcaatgtcctggatgcttgccgagctttctttcgacacgtctgcaatgccgctgactgctgctgaaacatgctgtgaacgatctgacagctgctcgacggtggaattcatcgtctgcagcttgcccgcgatttcgtttgtcatgctgaaaatgctctggaagctttcttttgtattgtctgtgacaacaagtccggactgtacttcctgattgacctctttaaacatgtgaagagaggtttcgatttctgcgacgatttcttggatcagcttttcgatttcttttgctgaatcggctgattggacagccagcttgcgcacttcctccgctacgacagagaagccgcgtccagactctccggcacgcgccgcttcaatggctgcatttagtgcaagcagatttgtttggtcagcgattccgttgatgactctcaaaatgcttgtgatgtcttttgattttccttctaagcctttgacaacagcttcagcctgctgaacagattgattaatcgagttcatttgtccgactgtctgctgcacaaacttctcacccgttccggcgatttccgttgattggatagatgcctttgtaatatctgacgatgtttgtgagacttgctggagtccttcattcattaagttcagctgatgagagctggattcaaccttttcgctttgctcctcgtttccgtttgagaactgctcaatcgccatcgtaatatgctcggtggctttactcgtctgcccggcagatgcggtaagctgttcggaagatgcggccacattgttcaccgagtcctgaatagcactgatcagcgagcggagagattgtcccatttcattgaagctttccccaagctccccaagctcatcctttgaatggatttcgatcgtttcggtcagatcccccctgctgatcgttttcgatgattgaacaagatgttttaacggttttgtaatcgaacgaacgataaacagaattaaaattccgcccgccacaatggaagcaatcagcacaatcattcctgtagtcagcacagactttgaggcatccttaatttcatccatatacattgtgccggctattttccaaccagtcagttcgtttgtagtataggtcatctttttatcttcgttattaagagtatactggagttcaccgctgtcattcgcatacattttggctacccagtcgcctgaaagcttttctccagccttatggttcttgtgggcgacataggttttgttttttgttgcaatgaaagcataaccttcttttccgaccttgatttgtttcatttgttctaacaatttatcaatggtaatatccatggcgacaacgccagatccgtccttcagctcctgtgcaatggtaatgaccatgcttccgtcactcgcagccacgtaaggatctgtcacgacaatttcaccgccggccttcatcgcatcctggtaccaaggccgttgtctcgggtcgtatccttccggcaatttttcttttggcgcttgtacataagtgccgttatctgcgcccccataaattctggctactccttgattaatagatacatattgtgaaaatttagctttgatctcttcttgattcgatttccctttgaatgcggaccttttaagagattcactgaaaaaggtgactgctttcgctttttctcccagatcatttgtaacagttgtattaaatgtatcgacactgtttttcgcatttcccataatttcctgatccagctttccgctggcgcttcggtaagagctaaattctaatataagaatagggataatgagaatcgcaataaatgagacgattaatttctttgaaatagacggtttcttaagccaattgataaaagtcttcatgtccacttgctccttcaggtttgatacagtatatatcggctgcttaaaaaagttttaaaataaaaaatggaagaagttctttttggctgtcttctgtcgttttaactttcattgcccaagctctttgcatatcttataaaaaacaaggggggctaaacatgattattgtatcaggacaattgctccgtccccaggatattgaaaattggcagattgatcaaaatctgaatccgctgttaaaagagatgattgagacgcctgttcagtttgattatcattcaattgctgaactgatgtttgagcttaaactgcggatgaatattgtagcagcggcaaagacgctgcacaaaagcggggcgaagtttgccacttttttaaaaacatacgggaatacaacgtattggagggtttcaccggagggcgccttggagctgaaatacagaatgccgccttcaaaagcgattcgtgacattgctgagaacggcccgttttatgcgtttgaatgcgcaaccgcaatcgttatcatttattacttggccttaatcgatactatcggagaagataaattcaatgccagctttgacagaattattttatatgactggcattatgagaaattgccgctctatacggaaacaggacaccactttttccttggagattgtttgtattttaagaatcctgaatttgatccacaaaaggcgcaatggagaggcgaaaatgtgattttactgggggaagataaatattttgcccatggtcttggaatcttaaacggaaagcaaattattgataagctgaattcttttaggaaaaaaggagccttacagtcagcctaccttctgtctcaggcgaccagactggatgttccgtctcttttccgcatcgtccgctaaaaagccccatcgcctattttccggacgatggggtttcaaatgcctttcgttttcgatagaagggggctgtgccgaaatattggttcgcagcccactccattttttcaaggtcatttcttgtcacgattggatcctggctgctccatttgataaagcggacaaaatagtagcctttgataggaaccattgtaacttttgagtgaggccagccttcaaatacaaactcaattttccctctttttttataagagtattgaagaatgttcatatttgtcacctcagtttatcaagttacgttcggcaaagctcggtacgtttacatccattgattgactatccctcatgcatgctttcctgaaaacaaagggtgaggcgcgtgtctctttccctcgctttttatttcgcatatggacgaatgccaagcgcgccttcattcgataaagcggcagccggggcgggtgtgacaagccctccggctatcggcgtttgttcagcgatcatgcttttgtcaaaaaaacagcctattatcccatcattttgatatagcatgtccgggtgcgagggccgtcaaattcgcagaaataaatgccctgccaagttccaagaatgagccggccgttttccacaatgacatgctgtgaagctccgactgtactcgacttcatgtgtgcagctgtattgccctccatatggcggtccagctcatgttcccacggatatacctcatcaaaccttctgagcatatcttttttgacgtccggatcggcattttcattaattgtaatgcccgcagtcgtatgcggacagtaaatcagcgctgcgccgctcgttatacctgtttcttgaagaaacgcttccacctcccgggtgatatcaatcatttcatctcgtttggttgttttgatttgcagtgttttcagcatttgtttctcctttcgtttgtccgctctcatcgcttaattcgttctgtgttcttttttttcctgttaaaccgctctcataaacccgataaaacaaaaaaactccagtctaaggctggagtttagcaccatagatatattcttgcttcatacggctttaagagtactgatgtcatatgcttgtgcggctctgtttcaatatttgacaagacgagtgcatctgatgacaatggcaatccagagtgcctgaacaacgccggtgttcctgtcagattggccgcaatcagtgcagtatggctctcgtttttccgaagatatgcaaagatttgctgatcttccggtaaaatgagctcgtatgtcccgttaataaaaacatcatatgtttggcgcagcttgatcaagcttttgtaaaaatggtaaacggatgttttatcgtttttttgcgcctcggcattcagccatttgtaattctcattgattccgatccacggtttggcctcagaaaatccggcgtatggacctgcattccattgcatcggcgttcttgaattgtctcttccctttttccagacaatcttcatcacatcctcgtgtgatgtgcctttcgctgtttttgtttcatacaggcgtttcattgcgacatcatcatagtcctcaatagagggaaaagccacgttcgtcatcccgagttcctgtccctgataaataaacggtgtgcctttcatgagaaaataaacagcggaaagcgcttttgcactttctttcaggtacactccgtcgtctccccacacagaaactgaacggggctggtcgtgattctccataaacaaagcattccagccgatcccttccagactgtcctgccagtcagttaaaattcgtttaaatgcaacgatatcaatactttcattgatctctacatcccacaggccgagatgctcaaattgaaaaatcatgctgaatatgccgtttttttctccagcccaatcagctgcttcttttgcagcgacgccgtttgcttcaccaactgtcataatcggatagcgggaaaatgtgttttccttcagctctgttaacaaatccataatgccgtcagcattcatatgataaggaaaggaagggacatagtccaatccctttggattcggcatgtcgggaagcccttcttttttcttaatatgcgtaatggcatccacccgaaatccgtcaattcctttatcaagccaccaattgatcatgtcataaacggcattcctcacctgttcattttcccaattcaaatcaggctgttttttatcaaaaaggtgcagataatactggcttgtcttttgatcatactcccaagccggcccgccgaaaatgctttcccaattgttgggcgcttttccgtttttgccgtctttccaaatataccagtcgcgcttttccgagtgtatggatgaacgggattctatgaaccatggatgttcgtcgcttgtgtggttcacaacgagatccataatcagcttcatccccagatcatgaatgtcaccaagcagttcatcaaaatcttccatggtgccaaactcgcttaatatgttttgataatcccggatatcatagccattatcagcattcggtgagtcatacagcgggcaaatccatatgacgtcagcgcccagctcttttatgtaagaaagcttggatctgattccttgaatatccccgattccgtcgccatttgaatctttaaaactgcgggggtaaatttggtaaacaacggtttccttccaccaagcctttttcatacagccactcctttccagtgtaccggtcttatatatcctatgtagaaaaaaggcttcacagcattgctttttaagaaatgacttgatgacacaaaaaacagccgtttgttccccggctgttttttatcaaaaatcagttttttttatttctacaaaacggatgtggtgatcttcggcgtcgaggattttaaattcacagccctccgcgtgtatcacatcccctgctttcagctccattttttgcgttagaagccagcctgcaatcgtatcaatttcttcattttcaatcgcaatgtcgagaaggtcattcacttcgtctattagcgcttttccatccatcacataatggtgctcgccctttttcaggatgtgcggtgtttcatcctgatcatactcatcgcggatttccccgacgatttcctcgataatatcctctacagtgacaagccccgccgttcccccgtattcatcgacaagaatcgccatgtgaatccgctccttctgcatgcggattaaaagctgctgaacaggaatgctttcaatgaccctgataacgggcctcatgatttgctccagctttatcggctggccgagaaaataagctttaaacatatctttgctgttgatgatccctaaaatatgatccttgtcatctttgatgacagggtagcgtgtataccgttcattaatgatgtgatgaattgcctcttcaagcgactgctccagagagataaccgcaatttctgtccgcggaatcataatctctctcgctacccggttgtcaaattcaaaaatcttatttacataacggaattcagactgattaatttctcccttttcatagctttctgaaaggatcagtcttagttcctcctcgctgatgacaacctgatgctcctttactgaatgaaagccaaacaatttcacaagaaaacttgcagagccgtttaatgctttaataaacgggtacgtgattttataaaaccagatcagcggctttgcaatccataagcttacagcttcagctttttgaatagaaaccgttttcggagcaagctcccccatcaccacatgcaaaaaagtgacgatgataaatgcaactacaaatgtgacaatgtggttaaacggttccggcatgcctgtcattgtaaataagggatgaagaaaacgttcaaatgtaggttcaccaagccatccaaggccgagggcagtaatcgtaatcccgagctggcaggctgataaatactcgtcaagattggagatgattttatgtgcggctagcgctcggctgtcaccgctttcgatgagctgattgatttttgaacctctgattttgacgatcgcaaattccgctgcaacgaaaacagccgtaatgccaatcaaaacaaaaatggcgatcaattgtaaaataagcaaaaaaagcccttaccataaatggtaaggggccacctccttaacgttaattctcatcacgaccgtttaagaaaatcatcacaaaacgaagtagttcaaacagggaaaccagggcggcggccacatacgttaaggcagcagcgctcagcactttatttaccccattttcttcattgtttcggatgaatccttctgacacaataatctgcttggcgcgtgaacttgcattgaattcgacaggcaatgtaatcagctggaaaaagactgccgctgaaaacagtatgatgccaagcccgatcaaattcaggctgccgagaagcatgcctcctaagaaaagcaaaggagctacaccggatgcaaaattcacgactgggaagattttatgtctcagcacaagcgcaccatatgactcctgatgctgcaaggcatgtccgacttcatgggaagctacggatatggcggaaattgagcggccgtaatagaccggctcagataaacgcaccacccgtcttgtcgggtcgtaatggtctgttaaagtgcctcttaccggttcgaccggcacgtcgtaaagaccgtttatatctaaaatccgtcttgccgtttctgcccctgtacgtccgcttgaggcttccacttttgaatatttttcaaagttgctctttactttaaattgtgcccaaaacgacaatcccaatgcggctattgttaaaaatataaacagcattttttcatcatcctttttccatgatcatttctctattaagattattttaatgagttttctttcccgtgtacagaaatgcgctttttcttccggcttggagcacagaatccaatcagcaaaaagaacaggcctgctgaaaacaaataaaaggcgaaaccgccggccagttctttcagaaaataaaaccaggagaagctgccggaaaagtgattatatgaattcaaatcgaaaataaacaaaatcaccgcggatgccgccagctgtgtaccgatcaaaaccacgatcgttctttgaaagatcgtcatctttttcatcctttttgttttagtttatggagaaatccggttttatatgttttgtacattttttgaaaaacatcaccggaagtgggacatactgttagaaaaaagcacgggtgtgatggaagctatgaaagtgacgagtgaggaaaaggaacagctgagcacagcaatcgaccgaatgaatgaaggactggacgcgtttatccagctgtataatgaatcggaaattgatgaaccgcttattcagcttgatgatgatacagccgagttaatgaagcaggcccgagataagtacggccaggaaaagctaaatgaaaaattaaatacaattattaaacagattttatccatctcagtatctgaagaaggagaaaaagaatgaaatcaaatcggatatttatttcatggctcaggtggccgttatttatccgaatcggggttattattttatgtctgattcttttgttcggccaaatcatttatatacttgagcctaagcagttcacttcggtattcgaaggcatttggtgggctgtcgttacggtttcgacagtcggttatggagactatgtgccgcacacgccgctgggacaggcagccggaatactgctgattttgagcggagcaagctttgtcacagcatatttcgctacgttatcagcggccgcattcagcagacagcatcgctacatcgaaggaaaagttgcttacaaaggccgggaccacatcattctgatcgggtggaatgaaaaaacaaaccggcttttgaaggaccttcagcttgccgccccttccaaaacggtcgtactaatcgatgaatccttaacagaaggcccgcttattgaaaacgttcatttcatacgcgggcacgctgccgatgatgggacactgaaacgggccaatattactgaagcggaatcagtgatgattactgccgatcagtataaaagtgaaactgatgctgatatgctgtcagtgctgactcttttatctgttaaagggcttaatccccttgcttactgcatcgtcgagattttgactgaccgttttgtcaccaatgcggagcgggcaggtgcaaaccaaatcatcggaacttcagaatttatcagccgggcgatgctgcagcattaccaagtcaagttacggccgtctaaacagcagaacggaatcaagctgacacttgatcagcatgtggagcttcttgctgttcctgacgaactaaagggagcggcttacaaaacctgtgttctctatttccttgatcacaacacaacaattataggcgtacaaaaagaggaggggccgatgatttcccctcctcttacatacaaggtgctcgaaacagatcaattccttgccatctagtgtaacagaacatcctccaattctttcacgagagaggcgccgatatccaaaaatgccggatcaatttccgcgtcccgcctttccggttcggaaaattgattaaacagtgattggaaaggccctccctcggcgtgatcgtcaacatccgcctgaaacacctgtctcagcataaacggcgttccgatccggacggccgcccctcgttcatcgagactgccctgtaccgcattgacgggaattcttaaaaataaatagccgtctctatcatcaattttataatcaaagtagccatgatcgtattcccagccgccgtttatcacataaccgagcggcttcatcacttgttccagttcttgaagcagaaaagactgcccatctatcgcggaaggtattggtatcatcagaatgccccttttttcacttatcctgtcccgccgaacaagacttcattcagaggcgcctacatggaaatcgttgtttctttcgcgcggccaacagaaaagaaagcgcattcaattaagaagtaaacagtcattgccgctgcaagccatacagctgaatcccaagacacataaacaaccgttgcatagagtcctaatttagtgaaaagagtatgggttcgttttaaatgcaaaatccgatgtaccgcatcggtaaaaagggcaagcggcaaaccaatgagaagaaaggcgtggatgaaaaaatgtgaaagcgtgccgccaaagcttgaagaaaactctgtatacacggcatcaaaggagataaggaaacttaaaatagctgcagaaaaaccggcaatgatgagatgtttaaccaattgtttcatgaacatcagcacctttctgattttataaaaagccgaccggcaaatgccagtcagctttctcacattaatcttccagacgtttttcaagctctgcttttttctcttcaaagccaggtttgccgagtaacgcaaacatattgactttatacgcttctacaccaggctggtcaaacggattgacgccaaggaggtaaccgctcatcgcgcaggctttttcgaagaaatatacaaggtatccaaaagtatatgcattcagctcaggaatgttaacgattaagttcggaacatttccgtctgtatgggcaagcattgtgccttggaatgctttcttgttaacgaaatcaacagttttaccggctaaatagttcaagccgtcaagatcgttatccgcttcctcaattgtcagttcatgtttaggtttctctacgttcaggaccgtttcgaataaatctctgcggccttcttgtacatactggcctaaagaatgaaggtctgttgaatagttcgctgaagaaggataaatgcccttctcatctttcccttcgctttctccgaacagctgcttccaccattccgcaaagtattgaagcgccggttcgtagttgatgagcatttcaattgttttgcccttattataaaggacattgcgaacaaccgcatattggtatgctgggttatcttccagttcagatgttgcaaaatctttgctcgcatccagggcgcctttcatcatgtcatcaatgttgacgccgctgacagcaatcggcaagaggcctacagctgttaaaactgaataacggccgccgacatcgtcaggaataacaaatgattcgaaaccttcttcgttagaaagcgtttttaatgcgccgcgctctttatcagttgttgcataaatccgcgctttcgcttcttctttaccgtatttctcttcaagaagcttgcggaaaatacggaaagcgattgcaggttcagttgttgtacctgatttagaaatcacattaatagagaagtcaacatcttcaagaagatccatgacgtctctcatataagatgaactgatgttgttcccgataaaaatgacttgcggattgccgcgttttgcttttggcaaagtgttataaaacgcgtgattcagcgcttcaatcgctgcccgcgctccaagataagaaccgccgatgccgacaacaagcaagacatcagagtcagatttgattttttccgcgctttttttgatgcgcgcgaattcttctttatcataatgttcagggaggtccacccagcctagaaaatcgctgcccgcgcctgttttttcatggatattatggtgtgctgtttttacaaagtcccgcaggtatgtaagttcatgttcgttgaagaaagtcaacgcttttgagtagtcaaagcgtacatgcgtcattgcttgtccctccataacggtataatgttttcatctttcactttatatgaacttatctgtgaaatcaagtcaagaagaaagggcggaatgactggattccgccctttgggtttatagagacgcgcgaaggatggcaagcacgtcatctttgttcagtttttggaagttgccgaagcccccgtgttccatttccttggctgcgatatcagcaatcagttcaagcttttcttctccaatattgtaatcagcaagacgagaaggtgcaccgaggcttgtccagaacgcagacagtttatcgattccttcaagcgcaatttctttatctgttttgccttcagtatcaatgtcaaacatgttgagcattaggtttttaaaacggcctacatttgtatcaagcgtgtatctcatccagtttgggaacagtatcgccaaaccgcccgcgtgcggaatatcatatacagctgaaacagcgtgttccattgtatgagaagcccagtcaccaaagtagcccatttggagcgtgccgtttaaagcaatagtaccagcgtacaaaatcgtttcacgaagtttgtagttttccagatcttcaagaagcttaggagctgtttcgatgaccgtctgcaaaacagcaaagcacattctatcctgaagcggcgtgttttcaacattatggaaatattgttcgaatacgtggctcatcatgtcaaccatgccgtatactgtttgattttctggaacggtgaacgtattttcagggtctaaaatagagaaacgcggatgagtgacattgctgccccatacaaatttctcgtttgtttcccagtttgtaatcacggaatctgggttcatttcagaccctgttgcagcaagagttaaaacagtgccaaacggcagcgcatcctccgctgttacttttttgctgaaaatatcccaagcgtcgccatcgtatttgacgccagctgcgattgcctttgtacagtcaatcacactgcctccgccgacagcaagcagaaaatcaatgtcatgctctctgcaaagtcctatgcctttttccactgttgcaagacgcgggttcggctctacacctgacagctcatgaacaacagcgccctcttcttttaaaatgcctgtgacttgatcataaaggccgttgcgtttaatgctgccgcccccgtaaacaagcagtacattcttgccgtattgtttgaattcttttcttaattgatcaagctgaccttttccaaaaatcagctttgtcggattataataagtgaaattttccatagtaaaacctccaaatgatgctggtaaaaaacagattttccattgtaacataagttgacaaaaagaaaaagggaagcagccaaacggctatttcccctttttttatagagatgctttcaaaattgaaagcacatcttctttgttgagtgatttaaattggccgaatgtaccgttagccattgccttgtcagcaattgtgtcaagctgctcatcattaatatcataatcagcaagacggttcggagcgccaaggcttgtccagaatgcggacagcttatcgataccttcaagggcaatttcttcatccgttttacctgcttcttcaacatcaaacacgcgaactgcaagctgtttcatgcgggcagggttttcagacaatgtgtgtctcatccagttcgggaacaaaattgccagtccgccggcatgcggaatatcataaacggctgatactgcatgttcaatattatgagtagcccaatcccctcttgcccccatagaaagcatgccgtttaatgcgattgttcctgtgtacaggatcgtctcacgcaattcgtaattttcgagatcattgatcagcttaggcgctgtttcaatgactgtacgcagaagtgattcacacatgcggtcctgatacggcgtgtttgatacatgatggaagtattgttcgaatacgtggctcatcatgtcaaccatcccgtagatcgtgtggtttttaggtactgtgaatgtattcaccggatcaagaatcgaaaatttagggaatacgagcgggctgccccagccgtatttttcttttgtttcccagtttgtaataacagatcctgagttcatttctgaaccagtcgcagcgagagtcaataccgttccgaatggcaaagcatcttttggctgatgctttttcgtaacgatatcccacgcatcaccatcatactttgctcctgcggcaatcgcttttgtacagtcgattacgcttccgcctccgacagccagcaagaaatcaatgttttgttctttacagatggcaacacctttattaacagtcgacacacgaggattcggttccacacctgctaattcatgcacggtcgctccggctttattcagctgttcaatcacttgatcatacaggccgctgcgtttaatgctgccgcctccgtacacaagcaatacgttttttccgtaaggtttgagttcctccggaagtctttccacttcgccgcgcccgaaaattaatttggtcggattccagtatgtaaagttttgcatgacatctcctccttagattttttattatgcagaatgtcctcaccacatgtaaagcaatcagctctcaccgatcagcataccagatggttttattttgcaagatgctgggaaagaagctgatataagcgagggcaggccagcctcatatggagaatgcatgtatagattctccaatatgtcacaatctataactgttttaataattcatggaggaggttgcaaaacatgagtaccattcaaagaatttgtcttgtattaaccatcattggcgccattaactggggactgatcggatttttccaatttgacttagtagcggctatcttcggcggccaagggtcagctctttcccgaatcatttacggacttgtcggaatcgccggcttaatcaacctcggtctgctatttaagccaaacgaggaaagatcacgtgaagaagcagcaaatcctgaaatgcgataggatatcaatcacgctgaaataggattttgtattaaatcaaaagcaccgaacattcctgtccggtgctttttttcatgcttattttttgataaggtctttgcggttggacatttcgatccactcttcaagcttatcttttaatgtgttgaaaccttgtggtgtagaagcttcttcgcttacttgagcagctttaggttttcttggtttgctttcttttttctcaggcgcagcttgtgtcgcacgaattgaaaggctgattttgcctttttcttcatcaacagcaagtacttttacttgtacttcgtcgccaactgaaaggtgctcgttgatatcttttacgaaaccgtgagtcacttcagaaatgtgtactaaaccttgagtttcttcatctaatgcaacaaacgcaccatacgcttgtaatcctgtaactttaccagtgtaaacactgcccacttcaaattttgctgccattcataacaactcctaagttaaattaaatatctgtttatacgcaatttaaaattatatcacacatgtcttatttccgcaaagaaaactttttcataaaaaaatcaggtttatgcacagcaaaaagggggtaaactgaaaataccaaaggctttctagtattcccccttttattggatgcgaacaaaaggttcgtatctttttttatattgttttgtgcaggaagcgtttcattctgactaacgcttcttgaagctgttcaatcgaggttgcgtatgaacaacggatatatccctcaccgctcggaccaaacacacttccaggaacaacggccactttttcttgcgtcagaagctcctcggcaaactgttctgaactcatccccgtgcttttaattgatggaaaagcatagaaagcgccgcccggatgatgacagctgagaccgatttcattgagcgattctacaaacagattccgtcttcttcgatagctttttttcattttttctacgtcttccatgccgttcttcaggccttcaagggcggcaaactgcgccattgcgggcgcacacatcatcgcatattgatgaattttaagcatggcatcccgaagcaaggatggtgccgcggcaaaaccgagcctccagcccgtcattgcaaatgcttttgaaaagcctgagatgactaccgtccgttccttcattcccggtaatgccgctatacttgtaaattcctcatcatatgtcagctccgcgtagatctcgtcggctaagacgatgacatcatgttttttggcaaactcagcaatctcattcagctcttccttcgaataaaccgaacctgtcggattcgatggtgagcagatgagaatggcctttgttttttcagtgactgccgcttcaaaatcagcagccgttgctttaaatcctttgtctgccgttgtatgaacgtgaaccgggataccgcctgccaaagaaacaagcgcatcatacgccacaaaacacggctcaggaatgatgacttcctcacctggattcacaatggcgcggatcgcaatatccaaagcctgacttgcccccactgtcacaatcagctcattatctggcgagtagctaagatcaaacctgttgctcaaataacggctgatttcctcccgcaatgagtataaacccgcattggccgtgtatgacgtatatccttgttcaagagagagaatgcttgcttcgcggacattccacgcggtaacaaaatcaggctcgccgacgcctaaagaaatgacgccttccatcgttgccgccaaatcaaagaatttgcggatgccggatggttttatttgttgtacatagtctgataaatacgaagtcatttacggtgacaccacgattcttttgtcgtcgtctcctgtttcaaacactttgccgtcatgcttgtattttttcaggataaaatgggttgtcgtagatacaactgaatcaagcgttgagagtttatccgaaacaaaacgcgctacgtcagacatcgaattgccgcgaatcacgacagacaaatcgtatacgcctgacatcaggtaaactgattcaacctcttggaatcggtaaatccgttccgccacttcatcaaaaccgacgccccgcttcggcgttactttgacgtcgatcatggccgtaacgccctcatgtccgtctacttttcgccaatcaatcatagcggaataatcgataataaccttttctttttccagtttgtcaataattgtttttacttcatttacagggatgcccgccatctttgcgattgtttctaaatcggcgcggctgttttcgtctaaaatttctaatatttctgtttctttttctgtcagtttcatttgattcacacctttgcaatgtcaagaaatctcatgacattatatcacgttttttgacgaatgctaagaaaaaacgaggagaaacttccgctagaatttacaatttcagggcataatacaaccatcaaaaaaagggagtgacacagaatggaggcggtttcaccaataaggcggtttacggtcgatggagtcaatgtatactacgaacattatcaaaatcccggcaggcaaacgctggtttgcgtacacggttttttatcatctgcattcagcttcagaaaagtaattcctctccttcgggacaagtacgacatcatcgcgcttgatttgcctcctttcggccaatctgaaaaatcaagaacgtttatctatacctatcaaaaccttgctaagcttgtcattgggattttggagcacttgcaagtgaaacaggctgtgcttgtcgggcattctatgggcgggcagatatcgctgtctgctgctctccaaaaacctgagcttttttcaaaggttgtgctgctttgcagttcagggtatttaaaacgttcacacccgacgatcattttcgggacccatatcccgtattttcatctttatatcaaacgctggctctcgaaagaaggcgtgatgaaaaatttattaaatgtggtgcatgacaaatcgctgattgatgaggagatgattgacggctatggcagaccgtttcaggacgagcagattttcaaagccatgacaaggtttatccgccacagagaaggagatttagaacccgagcaattgaagaaaatgaacaagcctgctctattgatttggggcgaggaggatcgaattgtcccaatggagatcggtaaacggctgcacgcagatttgcctaattccgtgctgtactcacttggccagaccggacatctggtgcctgaagaacggcctgaacttgtttctgaacacattgctgattttatcaattaaaaaaaccggtgctgaaccggtttttttaaggcgtgcaggagctgctgtttttaatgaataaaagctggccagccacttcccggcagctgtcgatcggcagcgtttgttcaaaagaagtttcaaatatttgctgaatgcttttcgccagcacgtcaggatcgtcttcatcatagactgcctgcacgacatcaacagcctccgtttcgtaaaactcttctccatatttaaacgggtcccatttggcaatgatcttaatcatttccctgaccgcttgactttcttccatattcatcaccgcttataataaaatttgcagttctatcttatcatagtgaagcttagaagaataaacatacatgagggggtaacagaatgaactttgataaacgagaagaacgccttggcacccaatcggtcaaatgggacaaaacaggcgaattatttggcgtgacagacgcactcccgatgtgggtggcggatatggattttcgcgcgccagaagcgataactgaagcgttaaaagagcgtcttgaccacggtatttttggttatacaactccagatcaaaaaacgagggatgctgtgtgcggatggatgcaaaacaggcacggctggaaggtgaatccggaaagcatcacattcagccccggcgttgtaacggctttgagcatggcggtacaagcttttacggagccgggcgatcaagtagttgttcagcctccagtttatacgcctttttaccatatggtggagaaaaacggccggcacattttacataatccgctgctagaaaaagacggcgcatatgcaatggattttgaagatttggagacgaagcttagtgacccaagtgttacattgtttattttatgcaatcctcataacccttctgggcgttcatggggccgggaagacttactgaagctaggcgaattgtgccttgagcatggcgtcacagttgtatcggatgaaatccattctgatttaatgctgtacggacacatacacacgccgttcgcttcgctctctgacgatttcgctgatatttctgtgacatgtgctgctccaagcaaaacatttaatatcgccggattgcaggcttcagcaatcattattccggatcgcctgaagcgcgccaagttttccgcaagccttcagcgcaatggtttaggcggactgaacgcgtttgccgtcactgcaatcgaagccgcgtattcaaaagggggaccgtggcttgatggattgatctcttacattgagagaaacatgaacgaagcggaagcctttttgagcaccgagctgccaaaggtcaaaatgatgaagccggatgcatcatacttgatttggctcgacttcagcgcttacggcttgtccgatgcagagcttcagcaaagaatgctaaaaaaaggaaaagttattttagagcccgggacgaaatacgggcctggcggagaaggatttatgcgcctgaacgcaggatgctctcttgcaaccctgcaggacggcctgcgccgcatcaaagccgcattatcgtaaatatagctgttaaacgcctttacgtcttcatttgtaaaggcgttcttaataaaggaattttatattttacttctaatatttagtgttataatagattcatattttatacgaaaggatttcacacgaatggaaattctaaaagactatcttctgcacatctgctttattttgtttcctattcttctttaccaagtgttttggcttggaaaacctgcgattcttgtgccaaaaataaacagcggtttggtcacgctcttcgcctgcggcgcctccgttttatgcattattttcccgattcatgaaatggactacatacaatacggccttcagatgattcccgttatcatttgtttattttacattagtaccgcttccggacttacagtcgccgcatctgtcctatgttttgaactgcttttttacgaaccttccgcaatgtttgttttcactttgctgccttttcttatcattatcccaatcttatttcagaaaaaatggccattcatgtccaaagcgaaaaaactgctgctgtctttattgatcagctgcgtggagattttcctatttttcgcctcaagctggattctttccgccttgaatattttaaattttcaaaaatcaggaattttcgtttacgaggcggcagtctcagggcttttccgctccagtgttcttctattaagcatctatattatcgaaagcatcgccgaaaatatcgccctgcgctcacagcttatccattctgaaaaaatgacgattgtgagtgaactggcagcgagcgtcgctcatgaggtcaggaatccgctgacagttgtccgcgggtttgtccagctgctttttaatgatgaaaccttacaaaacaagtcgagtgcagattacaaaaagcttgtactgtcagagcttgaccgggcgcaaggcattattacaaactatctcgatatggccaaacagcaattatacgaaaaagaggtttttgacctatctgcccttatcaaagagacaagctcccttatggtgtcgtacgccaattacaagtcagtaaccgtcgaggctgaaacagaaccggaccttttgatatacggagacgcaacaaagctgaagcaggctgtcatcaacctgatgaaaaacagtattgaagcggttcctcacggtaaggggatgatccacatatcagccaaaagaaacggccatacgatcatgatcaacatcacagacaatggggtcgggatgacagaccatcaaatgcaaaaactcggcgaaccttattattccttaaaaacgaacggaacgggactcggcctcaccgtaaccttttccattattgaacatcatcacgggaccatttcatttaacagcagcttccaaaaaggcactacggtgaccattaagcttcccgctgatcttcctcactagcaaatcgattggaactttaatagaataaatgcgaggtgatgacagatgagcacgtttgagacaggctctatcgttaaaggattttacaaaacaggtgtatacataggagaaatcacggcttgcaggccgcagcattatttagtgaaagtgaaagcggttcttacccatcccgctcaaggagaccttcatcatccaaaacaggcggatgtgccattttttcatgagagaaaagcgctcgcacatggtgaacagaccaatatcccccaccatatggtgaagccttatgacggtgaagtgccggattataccgaatctctgcgggaggcgacagcacagctgagagccaaattggatgaggatggttcggagtgggcaaaacgctcccttcataatctggacattttagaaaaagaatattttaacctgccataacccagtctgacaaaagattgggttttttacgtcgcgcgcttcaacagttcggttaaatcgattctctcgccgattgtgggcggttttggcttttcgagatactgcttatcctgctcaacaagcttaaaaagtttatatgctgtaagagcatcatcaagcgctttatgatgggtgccggttccggaatctccatactcttcggcagctttccataaacccgtcaatgtccggtctccaaaaaagtttttgtattcaagcgataaatctctcatttctcccttaaacgggaaagggatatggttaaacatacagttttgcttcagcactttcatatccatgtttccccacgtaataattgtgctgtttttctcaggatccagctcgtttagtttacggatgaaatcctcgaatctcattccttcgtctacctgtttttgggttatttttaaaaatgatttgcagcgtttcgtaagcttcgggaactttttcggtctaacatagctagaaaacgtctcaaccacttcatcatcaatcgactttacaattccggcttcaatgatttccgggaagaagttttgaggactgtactttccgtcaggcattgtaaattcgaaatcaataatgagtaagctgtttgtcgtcacctttttacacctgcctttcctccgatcagaaaatgctatctttatagtatatcaattccccttctcgacatttcttcattttctaaaaataatgaattttcccagccgcttcgtttcttttaaattgtgaatcgtttctttataattagtaaggaacccgaaataataagaaggtgatgttatttctatccgtaagaaaaactttgtcattgtgtggctggcgaacttttttgtctccgctagcacaacgatgatcgttccttttctctccttatacattgagacgctcagctctttttcaaacggctttgtgcaaaggtggagcggctatgtgttcggcattacatttctcatggcgttcttggtatccccgttttggggacggttcggagacaaacgcggatataagaaaatccttatggcaaccggaacgggcattgccctcagcattttcttcatgggctttgttacatcggtgtaccaattgttttttctgcgtatggcaatgggtcttgtaaccggattcatcccgacatctcttgcgatgatttcggcacagactccgaagagctcagccggcaaaacactcggcacgctgcaaatggggcaagtgtccggaagcttgttcggcccgcttttgggaggcatgcttgctgatcgtttcggctttacgtataccttttttatcacatcctttgtgattttctcgtctgttcttctcgtgttatttggtgtcaaagaaaagcctcttgcagagaaaacagccaaacgtacgtcttactcgaggaaagaagtgctatcctatatttttcaccagccggcgctgtgggtcatgatgctgttaaccatgctgattcaaacaggcaatttcagtatccagcccctgctcgctttatatgtaaatgagctgcatggacctgtcaatcttgcctttttctccggcatggcattttcagcaacggggctcggaagtttgctgctggctagaaaatggggtgatctgggcgaccgctacggccaccgccgcattttaatcggacttttgctcgccgcctctttcttttttattccgcaggcgctcgcgtcctcactcagcgtgctccttgttttcagatttttattcgggatggcgatgggcggtttgctgccatgcattacggcagcgatccgcgttcaggctcccggcagcattcaaggtgaagttctcggctacaatgtcagctttcgctttttaggaaacgtgctcgggcctctgctcggcggaatcatatcgagccattttaccatttcggccaccttttacgtcacggcgtttctctttttcgccggcgcctgcatgctttggatcatgcagaaacttcggaaagattcttatgccaaagcaagctgattccgagaaaaaactgaggaatcttctaaatttaaccttctcgtaatctcaaaagaatggtacgatatggctagaatttaggagaaaagagagtgaccatgttacgaaaaataatcggatggattttgctcctttgcataatcccattgtttgcatttacagttatcgcttccggaaaagaagtaaaacaaatgaagtccctggatcaggtgcttgataaaaatattaatctgaaagatatcagccttgttcagaacagctacatgtatgacagggacggctcccttgtctcggaaatcgtcagcgaccacgaaaaccgtgtgctcgttccatttaacaagattcccgaggaagtcaaacagattttcttaacatctgaggaccgccatttttacgagcataaaggctttgactttatgggaatggtgcgggctactgcttctaacgtaaaagacaagaaaattgaccagggtgccagcaccatcacacagcagctttcaagaaacttatatttgagccacgaacgctccttcagccgcaagctgacagagctcgcgtattcctatcagctggagaaaaaatatacgaaaaatgaaattcttgaagcttacttaaataccatttattttaacaatggtgtttatggcgtcggttcagcagctcaattctatttcagcaaaccgctgaaatctctcacagtgggagaaatggcttttatctgtgctatacctaataaccctacattatatgatcctctcaagcattttgactacacgaaaagccgtcaagaacgtttgcttaaagggctaaaagatgccggggtcattacggacaaagagctgaaaaaagccgtaaaacaaaaaatcaaactggatgttgaaaaaagagaagacaaatatcctgactacgtttcctacgtcaatgatgaattcactcagctggtgtctgaatcagaaggctttgataaacgccttcaaaaagcatcaggaaaacaaaaagaaaagatcgagaacgagctgtccgcaagagtcagcactctgatgaaagacggcgtgaaaatttatactgcacttgatccgtacatgcaaaatcaagttgtggcacaaatgaattccaagctcccgtatgcggacgtacagggcggagcggctgtgattaatcaccagacgcatcaaatcatcgctctatccggcgggaaaaactatcaaaaatatgactttaaccgcgcctaccaggcgtacaggcagccgggttcatccattaagccgcttcttgattacggcccttatattgaacagaccggcgcgacaacaagcagcaccattgatgccagcaagttttgcagcaaagactactgtccgcaaaactacaataaccgcacttacggcacagtgacgcttgatacggcgtttaaaaattcatataataccccggctattagaatgctcgaccgcgtcggcatccaaaaggcattcagttatattgagccgtatcattttgccaaacttgtcgacagtgactatcttcttccggcggcgcttggcggatttacaaacggcatgacgcctcttgagatgacaaaggcttatacgacattcggaaacagcggaagctatacgccgagccatgcgattacaaaggtgacagaccttaaaggaaaaacactttataaatggaatgataaagcgactcaaatattcagcgtccgcacgaacatgcagctgaaaaaactgatgtcttccgttgtgaaaagcggaacagggaaaaaagcatatttcaatgcgccttacatcggcggtaaaaccggaacatcaaatgattatcacgatatgtggtttgtcggcctgactgatacgtatacaatgggtgtctgggtcggaaaggatacaccgaccagcgttgaatatcttcacagcatcagccctcagctttccatctggaaaggaacgctgcaagcggcttattaaaggatcggaggggatatggagtgacttcagaacaaattccaaatcgcgttttgctgtttgacggtgtctgcaatttatgcaatggagccgtgcagtttatcattaaacgtgatccggacggattgatttctttcacatcgctgcagtcggaaacaggacagagcctgctgaaaaaaagcgggcttccgactgatcggtttgacagctttgtctttattgaagacggccaagtgtacacaaagtcaactgcagccattaaggttttcaggcatctgcgaggcccatggcggctcttcgtcctgtttttcgcagtgccgaagcctgtcagagatatggtctattcttttattgccaacaaccgctataagtggtttggcaaaaaaaatgaatgtatgctcccctccccttctattaaaaaaagatttttaccgtaaataaaaaatggctaggaagctagccaacacagattgttgacaaaatcctaaaacggcttcgttttaggattttgtcatcttttcagcgtgattgaaaacctttgaagtcgacgaagagcgagcattggatgtgaaacggcaggaacctgagaatctagccgccgttttattgcgtacagagcacgaagcgcaaatctgaccactaaacgctgaaatggctagcttacacaggtaagctagccattatgctattataaagcttgataaatatgaacagaataccgataacaaaggtaaaccaaaacagcagttccaatagaatgaatccaactaatgacatgagagaaagcgtcgaataaatccggtacacggtaaacacaaagtaagcgagcgtgacgaccgcaaaccagatcacaatccaaatgacattttgcaagagcacaaaggataaaatcccgccgcccaaataaatcatggaacccattctgagttttttcaggttgttcccttccggatcattagcaaaaaacagcaatgacagctcggtcacggtatttgcaattaatttcagagcggacagaaccataaaatataaaagtgcaaaggcagcaaataacgcaagcctgattcctttctctgaaaaataatcgagcattccatcatacattccaaatgaagacagcatcttcaacgcataaagtgaagttgagatggataaggacgaactaaaaagcaggatcgcaatcagcggaaaatatcctgtcaaataagtatttttcatataaaaaagtccctttctataatctacctcatttattatggaggacttaaaacacattgacaagataaattattccattttttctcctttttacgaattacggtcccaaatcttcacaaagcagcattttgagagtaaagtagtacgcaggaatcataaaacgtaaggaagttttatatgaaaaaaacattaaaactgcaaaccagactcaccatatttgtttgtatcgttgtattaatcgcattgctcattacgttttttacagtcggtgcccaaaccaccaaacgaattagagatcaggaaaaggccactgcgctgcagactgctgaaatggtagctgaggcgccgatgacagccgctgctttagaaagcggaaaaaaacaaaaggaactgcagagctacacaaagcgggttcagaaaattaccggcacggaatttgttgtcgtcatggatatgaacggtatccgcaaaacccatcctgacccgagcaaaatcggaaaaaaattcagaggcggtgatgagtccgaggtattaaaagggcatgtccatatcagcacagcctctggcacgctcgggaaatcgcagagagcgttcgtccctgtctacgcggagaatgggaaacaagtcggtgcagtcgcggtcggcatcaccgtaaatgaaattgatgaagtgatcagccatagcttacggccgctttactttattatttgcgtcagcatcttcgtcggtgtgatcggagccgttatcgtcgcccgtacagtgaaaaatatcatgtacggacttgaaccttatgaaattgcgactctgcttgaagaacggagcgcgatgctggaatcgacgaaggaaggaatactcgctgtcgatgaacatggcaaaattaaacttgccaacgcggaagcaaaacgcctattcgtcaaaatgggcatcaacacaaatcccattgatcaggatgtagatgacatcttgccgaaaagccgcttgaaaaaggtcattgagacaaaaaaacctcttcaagacagagacgtccgcattaacgggctggagcttgtgtttaatgaagttcctatccagctgaaaggacaaactgtcggagcgattgcaacattccgcgacaagaccgaggtaaaacatttagctgaacagctttccggtgttaaaatgtatgcaaacgcactgagagcgcagtctcatgaatttatgaacaaactgcatgttatattaggtctcgtccagctgaaagagtatgatgatcttggagattatattaaagatatagccatacagcaaaaatcagaaacaagtgaaattataaatgatgtcaaaagctccgtactggccggttttctgctcggaaagcaaagctttatacgtgagcagggcgcaaatcttgatattgaatgcaacggtgtcatcccgaacgcggcagacccttctgtcatccatgaacttattacaatcatcggaaatctcatcaacaatggcttagacgccgttgccgatatgccgaaaaaacaaatcaccatgtccatgcgcttccataacagcatacttgatattgaaattaccgatactggagcaggcatgtctgaagaagaccaagccaaagtatttgaacaaggctattcaacaaagggcaaaaaccggggattcggcctttatttcacacagcaaagcatcgaaaatttaaaaggccaaatgatcctcacaagcgaaaagaatgaaggaacgacattcagtattcgcatcccgtacgaaccgaaggaggaaaatcatgattaatgtactaatagttgaagatgaccccatggtgggtgaattaaataaacgatacttaagccaaatagatggctttcagctgaaaggcatcgcttcttcctttcaaagcgctctgcatattttaggcgagcaccatatcgacctcattttgcttgatatttatatgccgggaaaaaacgggctggaactgctgacggaattgagagcccaaaatgaagcggttgacgtgattgtcatctcagcggccagcgagcttgacgtaatcaagaaaacacttcggtacggagctgtcgattatttaatcaaaccgtttgaatttgaacgtttccaaacggctctgtctgattacagacgaaaacaaaaggtgtattcaacccatcgcaacatgagccaaaaagaactggacgccgagctttttcaaaagaaagaagcaacagaaaaagtgcagcttcctaaaggcctgacaaaaagcacgctgaagctgatctggtccagtatccagtcatttgaaaatgaatcttttacgacagaagacttggcaaagcacacagaaatctctcaagtatccatacgaaaatacttaaagtttcttgaagatatacaagttctgaatgtagaaatggcgtacggaacgatcggaagacctgtgtttcagtacaacgtaaacaacagtaaccttaacggaataaagcaatatctataagaaaacgcactgcttgctttgagcagtgcgtttttctgtcatatctcttgccaagatgcttgattctattgttgataagttatacaagaataacaaagggctttcacatttttaagcaaataattctaaaaatagatactttttaaaaaattatgcgaaattctatttatttcttattagttaaatgataaattatgattggttagttgatcccgaaaaactaagtcataagtcttacttcagaaaacgatgtcacggttttccgcccggaacgccttccgcatccttctcttccccgcctttcgaaggaaatactcacaccacgcttattcagggaagaatagaactgtctcagcgcattccatttgttattatcagaaaattttatcgattctaagaaattgttcaggacagcccatcacatgactggccggatcagctttgaaccaaatttttctggggggttatatcttgaataaacgaaaaatcggattggcgatgtcacttgtgatcgcagcaggcaccatattaggagcatgcggaaacagcgaaaaaagcagcggctcaggcgaaggcaaaaacaaattcagtgtggcgatggttactgacgtaggcggagtggatgacaaatccttcaaccaatcagcctgggaaggcatccaagcctttgggaaagagaatgggctgaaaaaaggcaaaaacggttacgactatcttcaatccaaatcagatgcagactatacaacgaacttaaataaattggcgcgtgagaattttgacttaatttacggcgtcggctacttaatggaggattcaatcagcgaaattgctgaccagcgcaaaaatacaaactttgcgattatagatgctgttgtcgataaagacaacgtcgcaagtattacgtttaaagagcaggaaggctcatttctcgtcggagtggccgcagccctatcaagcaaatcaggaaaaatcggctttgtaggcggcatggaatcagagttaatcaaaaaattcgaggtcggcttccgtgccggcgtacaagcagttaaccctaaagccgttgtagaagtgaaatacgcaggggggttcgataaagccgatgtcggcaaagcaaccgccgaaagcatgtataaatcaggcgtagatgttatttatcactctgcgggcgccactggcacaggcgtctttactgaagcgaaaaacctgaaaaaagaagatccaaaacgcgatgtctgggtcatcggtgtcgataaagaccaatacgcagaaggccaggtagaaggaacagatgataacgtcaccctcacttccatggtgaaaaaagtagatacagtcgttgaagatgtaacgaaaaaagcgagtgacggaaagttcccgggcggcgaaacacttacctacgggcttgatcaagacggagtcggcatttctccatctaaacaaaatctatcggatgatgtgatcaaagcggtcgataaatggaagaaaaaaatcatcgacggattggaaatcccggcaactgagaaagagctgaaaaccttcaaagctgaataagaatcgcagggataaggaggtcgagcccttatcccttgtttttcttttattttgaaataaaggagcggtcaatcaatggaatatgtcattgaaatgctcaatatccgcaaggcgtttccaggtatcgtcgccaatgacaatatcaatcttcaagtcaaaaaaggcgaaatacacgcgttgctcggtgaaaacggagcggggaaatcaacgttgatgaatgtccttttcgggctgtatcagccggagcggggtgaaattcgggtgcgcggcgagaaggtgcacatcaacagcccgaacaaagcgaatgaacttggaattggaatggtgcaccagcactttatgcttgttgacacctttacagttgctgaaaatattattctcgggaaggagccaaagaagtttggcagaattgaccggaagcgtgctggccaagaggtgcaggacatttccgatcgatacggcctgcagatccatcctgaagcaaaagcagctgacatatcagtcggtatgcagcagcgcgcagaaatattaaaaaccctctaccgcggtgccgacattctgatttttgatgaaccgacggctgttttgacgcctcatgaaattaaggaactgatgcaaattatgaagaacctggtcaaagaagggaagtccatcatcttaatcacccataagctgaaagagattatggagatttgtgaccgcgttacggttatccgtaaaggaaaaggcatcaaaacccttgatgtccgtgatacaaaccaagacgaactcgccagtctaatggtcggccgcgaggtatcgttcaaaactgaaaagagagctgctcagccgggagcggaagtgcttgcgattgacggcataactgtaaaggatacccgcggaatagagacagtcagagatttgtctctttctgtcaaagcgggagaaatagtcggcatagcaggcgtcgacggaaacgggcaatcagagctgatcgaagcggtgacaggactccgcaaaacagattcaggaacaatcaccttaaacggaaaacagatccaaaacctgacgccaagaaaaatcactgaatccgggatcgggcatattcctcaggatcgccataaacacggtctcgtccttgattttccaatcggagagaatatcctgctgcaaagctattacaaaaagccgtattcagcattgggcgttttacataaaggcgaaatgtacaaaaaagcacgcagcctgatcagcgagtacgacgtcagaacgccggatgaatatacacacgctcgggcattgtcaggcggaaaccagcaaaaagcgattatcgggcgggaagtagaccgaaatcctgatttattaattgccgcccagccgactcgcggccttgatgtcggagcgattgaatttgtccataaaaagctcattgagcagcgtgatgccgggaaagccgttcttctcctctcgtttgagcttgaagaaattatgaatctcagtgacagaatcgccgttatttttgaaggacgcattatcgccagcgttaatccgcaggaaaccactgaacaggagcttggtctcttgatggcaggaagcacgcaaaaggaagcggggaaagcaaatggttaaacgactctctcatttactcgtgccgctcatcgcaatcatccttggtcttgcggccggcgcgttgattatgcttgtgagcggctacagtgtggctagcggatattcggctttgtggaatgggatattcggagaaatctattatgtcggagaaacaatccggcaaattacgccttatattttatccggattggctgtcgcctttgcattccgaaccggactctttaatatcggcgtcgagggacagctgctcgtcggctggacagcagcggtttgggtcggtacggcgtttgacggaccggcatatattcacttgccgctcgcattgattacagcggcagctgcaggaggattatgggggtttattcccggcattttgaaagcgcgattttacgttcatgaagtcattgtcaccattatgatgaattatatcgcgctgcacatgaccaattacatcatttcaaacgtcttgacagatcatcaggacaagacggggaaaattcacgaatccgcctccctccgctctccttttcttgaacagatcaccgattactcacggctgcatttgggaatcatcgttgcccttctcgcagcagttatcatgtggtttatcatcaacaaaactacaaaaggatttgagctccgggcggtcgggtttaaccagcacgcttcccagtatgccggcatgagcgtgcggaagaatatcatgacctccatgcttatctccggcgcttttgcaggccttgccggagccatggagggcctagggacattcgaatacgcagcagtgaaaggcgcatttaccggcgtaggctttgacggtatcgctgtcgctcttctcgggggaaacacagccgtaggcgttgtactggcagcatgcctgcttggcgggctgaaaatcggcgcattaaatatgccgattgaatcaggcgttccatcagaggtcgttgatattgtgattgctattattattctatttgtggcttcaagctatgcgattcgtttcgtcatgggcaaattgaagaaaaagggggcgaactaagtggacattgtgcagattttatctatcattgtccctgccacactcgtctatgcggccccgcttattttaactgctctcggcggcgtgttttccgagagatcaggtgtggtgaatatcggcttagaaggcctcatgattatcggggcgttcaccagcgtgttatttaatttattttttggtccggaattaggtgccgccgcaccttggctttcgctccttgccgccatggcagcaggcgccctgttttcactgattcacgcggcagcggcgatttcgtttcgcgccgaccagacagtcagcggtgtcgccattaacatgctggcgcttggggcaactttatttatcgtcaaactgatctacggcaaagcgcagacagacaaaattccagagcctttttataagacgaaaatccccggtttgggcgatattcccgtcttgggaaaaatcttcttttcggatgtctattatacgtctattcttgcaatagcacttgcctttatttcctggtttatcttattcaaaacgccgttcggccttcgtatccgttctgtcggcgagcatccgatggcggccgatacgatgggaatcaacgtatataaaatgcgctacatcggcgtgatgatcagcggattgttcggcggtctcggcggcggcgtatatgcctccacaattgcgcttgatttcacgcactctaccatctccgggcaaggttttatcgccctggcagcgcttgtattcggaaaatggcatccaatcggagcactgggggccgccctgtttttcggattcgcccaaagcttaagcatcattggatcactgctccctctttttaaagacataccaaatgtgtatatgctgatggctccttatgtcttaacgattctcgctttaaccggctttatcgggcgggcagatgcgccaaaagccaatggcgtgccttatattaaaggaaaaagataaaacattctcccctgggaagacgattctcaggggtttttttctaatccaaaagacccccttaatttaattgtttattagttttttaacttaaaaaaatatgaagtgttaacgctttcttgtagactgtaacaaacaatacatgggggtgtatgacatgggagcaattccaaaaacggggacaatttcacctgagcaaaaagactcacaggggaaaaacctgtttcaaaaaatctggtcttgggaaatcggtgtgattcctctgcctttatacacagtattagctgttattattattcttgcagcctattacaatgagctgccggcaaatatgcttggcgggtttgccatcattatgattcttggtgtgtttctcggagacataggccaacgcataccgatattgaaggatattggcggccctgctattttatctttgtttgttccttcatttttagtcttttacaatgtactgaattcaacatctttagacgctgtaaccaacttgatgaaaacgtctaacttcctttatttctatatcgcttgccttgttgtgggaagtatcctcggtatgaacagaattgttttaatacaggggtttatcagaatgttcgttccactggttgcaggaacgatcgcggccgttgcagccggcatccttgtcggatttatttttggctatagtgcctatgattcctttttctttgttgttgtcccgattattgccgggggaataggcgaaggaattttgccgctttcaatcgcctactcacaaatactgggctcatctgctgatgtatttgtgtctcagctggttccagccgcaattataggaaacgtttttgctatcatatgtgcagccttaatgaaaaagcttggcgataagcgtccagatctaaatgggaacggacgtctcgtaaaatctaaaaaagcaaatgagattttcaatcaaaaagaagccgaagcaaaaattgattttaaactaatgggagcgggagttctgctcgcgtgtacattctttatttttggcgggttattggagaaattcatcttcatcccgggcgcgatcttaatgattatttcagctgcggctgtcaagtatgcaaatattcttccgaaaaaaatggaagaaggcgcttaccagctttataagtttatttcttcaagctttacatggccgctgatggtcggtctcggcatcctctttattccgttggatgacgtagcgtctgtgatttctataccgtttgtcatcatctgtatttcagttgttatcgcgatgattggttctggatatttcgtaggcaagctgatgaacatgtatccggttgaatccgcaatcgttacctgctgccacagcggtctcggcggaacgggtgatgttgccattttatcggcatcaggaagaatgggccttatgccgtttgcccaaatttcaacccgtctcggcggtgcaggcacagttatttgcgcgacagtgctgcttcgttttttcacttcataaacagaaagagttccgttttatgcggaactctttttttatttattcacaatccgaatatactctcggggaccaaacggcagatcctttgattccatctcactcattctggctgacaggtggtgctccagtaaatacagctcccactcatcactagccgccacaccgctgcgcccgtcatattgattcaacatgaatgcccctgcaaatactgagcagaataaacctgagcacatcacgacttttcttttcacatgaccagctcctttccttcagcttgatcaggattgattttaaatatacaaataacctcttttttgttagacttattttgaggtcaaaagaactcataaaaacccattacagcagttcgaagcgtggcagcttgcagaaaagtgcgatataatttggactaggtcgtttgaccgtatatttcatacatagcgcatttttcaattgagaacgagaaaaggaggtcttatctttgcagctcttacatcttgctattttatcgccttttttatttgcttttatcattcccttcttggcaaaatacgcaaaaagagtgcatacgggctggtttgtgttgatcctgcccgtcttgctgtttatatactttctcccaatgatcaggatgacacaatctggagaaacacttcgatcggtattagagtggattccgtcactcggcattaactttaccgtttatatagacggcctcgggttattattcgctttactgatcacaggcattggctctttggtcactctttacagcattttttatttatcgaaagaaaaagaacagcttgggcccttttatgtctacttattgatgttcatgggcgccatgctcggtgtcgttctagtagacaatgtcatggttctctacatgttctgggagcttacaagcctttcatcctttttgctgatcggctattggtataagcgagaaaagtcgcgctatggcgcagccaaatcacttttgattacggtcagcggcgggctgtgcatgctcggcggatttattctcctttatttgataacggattccttcagtattagagagatggttcaccaggttcaattaattgccggccacgaattgtttatcccggctatgattctcattttattaggggcttttacgaaatcagcgcaatttcctttttacatctggctccctgacgcgatggaagctccgacgcctgtcagcgcttatctccattcagctactatggtaaaagccggcatttatgtgattgcgagattcagccctattttcgccttttcagctcagtggttttggatcgtgtccctcgttggcctctttacgatggtttggggttcattccatgccgtgaaacaaactgatttaaaatcgattttggcgttttcaaccgtcagccagctcggcatgatcatctccatgctcggagtcagtgctgcggcccttcattacggacatacagaatattatacagttgccgctatggctgccattttccatttgatcaaccacgcaacctttaaaggaagcttgtttatggcagtcgggattatcgatcacgaaacaggcacacgggatatccggaagctaggcggcctgatggcgattatgccgattacatttaccatttccttaatcgggacattttcaatggccggcttaccgccgtttaacggatttttgagtaaagaaatgtttttcacaagcatgcttcgcgtgacacattttgacctgttcaccgtgcagacatggggcgttctgttccctcttttcgcctggatcggaagtgtatttacgtttatctacagcatgaaattgctgtttaaaacattcagaggaaattaccagcctgagcagcttgaaaaaccggctcacgaggcgcctgtcggcatgctcgtaccaccggtcattcttgtcgctttggctgtcagtctcttctttttcccgaatatattgtcgtacagcctgatagagcctgcgatgaactcaatctatccgacactgcttgccggccatgagaaattccacgttcacatttcacagtggcatggggttacaacggaattgctcatgactgcgggtattgttgtgatcggaacaattggttatttgtcgctgaataagtggaaaggaatctataaactgtttccttcgaaactcacactcaatcggttatacgataagcttttgactctgatggagaaaggctcttaccgggtcacaaaacaatatatgaccgggtttttaagagattatttgctgtatatcttcgctggtttcatcattctgataggcggagcttttgccattaaaggcggattttcatttaaaacggaaggcatggctaaaatcggtgtatacgaaatcattttgacgcttgtcatgatcagcgccacagtggcgactgtttttgctaggtcaagactgacggcgatcattgcactcggtgttgtcggttatacgcttgcattgttttttgtcattttcagagcgccggatttggcattgacccagctcgtcattgaaacgatttctgtggcactgtttctgctttgcttctaccatttgccgaaactgaggctgaaaacaaaaacgagaacgttccggatgacgaattttatcatttctttaggcgtcggtattattgttactctgcttggtatcgcatcctcaagccagcggacaaaagacagcattgcgtccttctttgtcaaacacagccacgatctcggcggaggggataatgtcgtcaatgtcattcttgttgatttcaggggatttgatacaatgtttgaaatcacggtattaacgatagccgctctcggcatttacagcatgattaaaacaaaagtaaaagaggaggggaaaagcggtgaatgaacaaaaaacaaatgacttgattcttcaaaccgcgacaaaacttgtatcctttatcattttgcttttctctttctatttatttttatcagggcataacgcgcccggaggaggctttgtcggcggactgatcacgtcctcttccatcgttctcttgctcttggcgtatgatttaaaaaccgtgcgttcccttttgccggtcaatttcatttatgtcgcgggagccggccttctgctcgctgtattaacaggcgttggctcctttgtcttcggagctccttttttaacccacacattcggatactttcagctgccgatccttgggaaaacggagctcgccacagcgacgatatttgatttaggcgtttatcttgttgtcgtaggcataacgatgaccattattcaaacgattggagaggaagaataatggaaatcttaatggctgtattagccggtattatttttatggctgctacgtatttgctgctgtctaaaagcctgcttcgcgtcattatcggaacagcactgttaagccatggcgttcatttaatgcttttgactatgggaggattaaagaaaggcgccgctccgattttgagcgagcatgccaaatcatttgtcgatccgcttccgcaagccctgattttgaccgcaattgtcatttcttttggcgttacatcattcatcctcgttatggcctttcgcgcttatcaggaattgaaatcggacgatatggatcaaatgaggggaaatgatcaacatgaataattttgttattttgccaatcctgatcccgcttttgtcggctattcttctgattttcatgacgaagaatcttatgctcatgagaatcttcagcacggcggcatcggccatcgggattgtgattagcggcatacttgtacagactgtcttcacaaaaggcatccagacactcagcttaggcggctggaaagcgccgtacggcattgtgcttgccgcagaccaattcgccagccttctcgttctcacaacagcgatcatcggtttattggttgggctttattccttccgttctgtcggtgaaaaacgggagcgctccttttactactccggcgttcagttcttgcttgccggcgtcagcggagcgtttttaacaggcgatttatttaatatgtacgtattttttgagcttctgcttattgcttcctatatgctgattgtattaggcggtacaaaaattcagctgcgggaatcccttaaatatattgtgtttaatatcgtatcgtctgccctgtttgtcataggggtcggctttttatacgctgtaaccggtacgttaaacatggcagatcttagcatgaaaatcagcgaaacaggacaaaccgggctgatcactgtgattggtgtcctgatgcttttggtatttggcatgaagggcggaatcttccccctctacttttggcttccaggctcttattacgcgccaccggcagcaatctccgcgttgttcggcgctttgctgacaaaagtcgggttatatgcgattgcgagggttttcacattgatttttattcacgatacagcctttacccatcagctgatgatttggctggcggcgctgactgtgatttttggtatcatcggttcactcgcttattcgaatgtcatgaaaattgtgatctataacattattaccgctgtcggcgtgattttgttcggtgtggcagtacacaccccagcatccattcagggcgcgatctactatctgattcacgatatgctgattaaaggcgctttgtttatgctggcgggtacgctgatcgcattgactggaactgcgagcctgcataaaatgggcgggctgatcaaacgctatcctgttcttggatggatgtttttcatttccgctatttctcttgcaggcattccgccactgagcggatttgtcggcaaatttaaaattgcggagggcggcttcgcagaaggtgaatttacgatatccatgctgattctgctttcgagtctgcttgtactgtactctgtgctgaggatctttatacatgcgttttggggcgaagaaaaagaaacgccaaaaccaaatcatcgaacagctaaaggacttctttatccggcagctatttttctcttgctgtctcttctcttcgggttgggtacagaatgggtgtcgccttacgttgatcaagcggccgagacgctgctgaatccggaaaaatatatcgaagctgttctgaaggagtagatcgcatggcttttcaaattttattaaatgtgtttctcgctttttgctggatgttcttaagcaacagtccaagcgccgcaggattcattacaggctatattctgggaatgctctctctctttttcttccggcgctttttcactcgccagttttatctatggaaattgatttctatcatcaagctctgtttcatttttataaaggaactgtaccttgccaatgtcagtgtgatgaaatcagtcttatctccaaaactgaatatcagaccgggtatttttgcttttaaaactgaactgacgaaggactgggaaatcaccctgctttctctgctcattacattaacgccgggaaccttggtgatggatatttcagatgacagaacaatactttatattcatgcaatggatatcgaggatgcggaaaaagcgatttttgacattcgggagtcatttgaaaaagccatacaggaggtgagccggtgatgtttacgctgatcctgcaaatcgcgctcggcattatggcagtgtctacctttttgtatgtcattcgtgtcattaaagggccgactgtgcctgaccgggtcgtggctctggatgcaatcggcatcaatctgatcgcaatcacggcgcttgtctccattttgctgaaaacaagtgcgtttttagatattattttgctgctggggattttatcgtttatcggaacgatcgcattttccaagttcctggagaaaggagagattatcgaaaatgatcgaaaccgctaaggtcgttgtggctgtattcattttgctgggtgctcttatatgcctcattgcttcatttggcgtacttcgccttcccgatgtgtttacacgcgctcatgctgcttctaaaggctcaacattgggtgtcaatatgattctgctcggtgtcttcttctatttgtggtttgtgacgggggagctctccgctaaaatcctgcttgggattctctttatctttattacgtcgcctatcggcgggcacttgatctgccgtgctgcgtataactccggcgtcaagcttgatgagagaagcgtacaggatgactataacggaatcagaaactttgtgattaaacgaaaagaggattcttatctataaaaataagcagccggacaggcagagttccggctgtttttttatttcttgatgacagccagcgtgcatctggatatacagatcagcctctcttgctcgtcatatatgtgaatgtgatagacaatcgtcgttctgccgatatgaacgggctcggctaccgcctttaccgttccttccttgacagattttaaatggttggcgttaatctccaaaccgacacaagcctgtgttgaatgatcaatcaggttctgtgcacctgcgctcgccgctgtttccgccagggccactgaagcgcccccatgcaaatatccgaacggctgcaccgtccgatgatccaccggcatgaccgcaacgcaacgttccgctgtgttttcaacaatctctataccaagcgcttcaagcaatgtgtgcttcgtatccatcatctacacccccaatatttaaagtacaccgtctgatttcgcaatcaaaaccgcttccgtccgggaaccgacattcagcttattaaaaatcgatgtcaagctgtattcaatggaccgcttgcttaaatgaagggcatctgcgatttcttggtttgtaaatcctttttcaacttcttgaagaatcaggcattctctaggtgtgagcacatcttgttctttttgagaggaaggagccggctttgttttttgctgagtcatcagctgtttaaagtaagcaaaatcgactaaaatttctccattgagtacgtggtatatgtattgggtgatcttttctttagattccgttttgctgatggcaccgtgcagacccgcacgaatcgcttcctcgaaataatcctcgacctcataaccggtatacacgataattttacaatgaggattctcttgtaaaatctgtttagaaagctccatcccattgacctcgccgcctagattcagatccattaaaatgagatcatatgacgagaaatcatgctgcttgataaactgttcgctcggttcaggactgagacaatcaacagacaaattcgaatccgtttccaaaattgtcttggtgccttccatgacagccggatggtcatcaatcactagtatctttttcatgttttcctcccttttactcactcttttccattttataaaaaagacttggcctgtgccaagtcgtttccgttataaatccattacaattcgatttcaatatcagccttaaagccctttccttcacttgtttcaatccgaaggcgcccatctaaagccctgactctctccttaatgccagaaagccccatgctcatggaatgctcagtatttttttcttgatcaaaccctacgccatcatcctcataatgaagaacgattttgttttgaatactgatgagcataatcagcacatccgtcgcctgagagtgcttgaccgcattagacagaaactcttgaatgatccggtacaaattcagctgcgaatccagatcaagggaagccgtaaatctcccggtatttaaacggatatgaaacggaacccgctcctgctgctgcgccaccagcttcgacagcgccttcaccaatccaagatcatacagaagctgcggccgcagctcatgacacgtctccctcgtcatcgaaatcacatcagacatctgctcattcatctgcacaagcttgtcctgcacctcttcacggcacggattatcatccttcttaaaatcacccaaaaacagctcacactggcgttttaaggaaattaaatcctgaagaaccgaatcgtggagatcgcgggcgagatccgagcgttgtttttcctcgatcgtgtacatgagttttttgagccatacggggttggattcttgttgttttatttcttctaaatgactcatcagttcttcgattttcatgacgttttcgatcgatacgtttgtataaaaagccaaagttttcagccaagaaagttcttcgagtgtgagacgaggcgtattcattttagataaacaaaggatcacaaatgatttaccaccgcgttcacctattttcatgacaaagcctttattaaattcaacgattttccctatttcggatgttacttttctaaattctttttgatagactttttcaaatgaatttacgttctcatcatcatatagtttaatatttccgtcagctgaaacttcatatacatgtgctcggctaacaagagaaacctcaagtatagtatttttcagttcttcaaatacttgagatagggaagtagagtctcttatcatctgcgtgaatttatatatactgtcttgataattgaatttttctgagaccctttttaatctaaatctgaaatcaagtacttctttataataaaagaccgccaacatgataatataaattaaaaaggttagtttaacactataaaaatcactatcaggactactaattaattcaattgtagagattagaataattgttggcgttagagctaaaaagccatagtaccttaatctgcttaaaataaaatctacattatagattttatttgtcatgaattgaaataccaatgagaatggtatcagcagcataaatgaagccgctaaaaaagaagaaacataatgtgcatttaaaaacacgtaaggtatcaaatataaacacagaaaaggcgaaaaagaaaagatattaatgatagtgagaaccttaataatatgtgcttgttcagtgtctttatttttaattagtatgatactaaaataaacccctactataataaataaaaagaaaaaagcaagtaaatttaatttaggaacataatctcgaaagaaaagatgtgaacgaaaaatttcacaaactacatttatgaccggaatcaaatataaaataaaaactttcttattaaataatttggttcctaattctttgaaatattgataaagaaagagaagatagtttagcggaacagatattaatgttaccaccattataagcctgctcagcatatctcccttagcagaccctccagcacttataaatgcaatagaggcagacaacagaaagataattaaaactacagctgagagaaggttctttgattcatttatttttaatataaaaaagcaacaaaataaacaaacaatataaaatattaacggtattaagtaagtagtgaaatttttatcattaaataaggtcattttcaactcaagattatgtccatttctttccacaatcatcgaacttacattttttagtttgttcatttttatttcgtttgtgtttatctttttattattaatactctttacgatatctcctttttctataccgctgtatgaagccattgaaaattcatctacattggtaattacaatatcgccattttttcctttagagacagttgcccctactaataaattattattactaatataagtcaaataaataacataaatcaaacttaatacaactaacactacagaaattttgttatttctagacttcatttaaacctcagtacttccaatctagcattgaataaatttctaatcctttaaaaccatttattatgcattcagattgatcattatcaacacccaataaacaagcatttccttccattacttcccttaaaacatttgggtatttaattaagtatcctaccatttcttgcataataaatcccctccttatttaatcataacagacaataatttttcagttttatcttctcctagttttaattgtgacatttcattttttattttttggagagataaatgtttcatcaccagtaaatattgtataacgcctgcttctgtcaattttcgcttcaaagccttagtattaattgaaacaaattcctctggtttttgatataaacttagtagctccgctgaagcatcgttaaattgtttctttaagtataagtatgccaatgtattttttttctgaacaaaatcgttatttaagtaaaacaaacctttataatcattatcgatctgtgaaataatcccaagttcataagaataagaagccacgatgggatgatatttgcctgttgccaacattactcccattacacaaggcaatgccgttagcgctcctgatttatttttgatcatttcaagacaggcttcttcagtttgcggcgcattcacaatatcatcatgctggccttgaattgattgtaacgcaaaattcaatatctcttgtgaaaattctggttcatgactagcttgacacatcacttgtatacttagggtgtaaagagctgtaactgcatttaaagcgattgacgagtcaatcttcatccagacagcacttccattatcttgatcctctaagtcatcataaatatcgaatgagagtataagcaattcaattccggcagctagccattcgattgctttttggtcctgaccgttaaaagctaaataatgatgaagagccaaatcggcaaactcaaacgtatccttagactcaataaaattctgaagatatcgttccaagtcctgattcattattttttggcttacaatctccttcattttctccttgatccggacagaatctaaacatatctgctcaataacgacttcccccctcccattccattttactaaatgggacatttaaaggacagcaggtttttcgttttttaacaatcatataatactttatccatttattgtatcggtagaacgaaaaaaaagacttgtttccaagtctttttcacgaaattttcattgcataattgtatttatcgagttgatcaatgcttttgttaatgtttcgtaatgaatctgtcgtttctttaatatcaagttcgagtcggaataacaattgttttacttcttcaagtttcttttccatcgtttccacactcctttttttgaaagatcaatgaattgtgtatggtgaacgagtcctaggtatttgatctgttactaatagtgtatctgctttcggctcatttttcaccgaaaagtatgcaaaaaagtcctgcgtgacaccgcaaatctcaataggtccttatactcaaaggaatcacaacaagaacgggactatctttctatgcgaaagagcgtttatatgtgctgaaattgagaaagattcttaatctccttgattttaacgggtttcgcattttcattaagcaagactatagtccttcataccgtattttcaaaattgaatatgcgattcttggcgtttcctgaccgacaaacaccgaaaaagaccgcaacgctaaagttgtggccttttcgctttgtcatattcggcaattagggatctatacatatagaaacatccttttttgcgaggtgctcccatgagatatcgttatccctggttttacgtgtatccgtatgaggtacgccgtccgcccgctcctgccaacaatattgatacctttatccgttcagcgaggcaggccgcagggatatttgcggatgcccagctcgttctcggccgcattgcgggctcgcgggagctctcgcgccgcattctgacggcagccgagcagtccgataaacaaaccatcaagcgcctgatcaaacaattgggcgtccggcatgaagtggatacggtctttaatcccgacggcatctatatcagtcttatcggaacgcaaagccgaatgattcttgctttgcggtggtcagaggaccgcaatcattttgcgtccataagattatgacaccattccagagcctcaagataacattcatacgcttcttctttgtcgagttgattgcctaattccgagcaagtgtcccagttgttgctttcaattaatttcacaagctcaagcatttggtagtagtcgttttgatggcctaataatgcttgcccgacttcatcttttaaaggcaattcttgaacaatttcctctatttctctatgcaggagggtgtctatgagagaaaacattccgatcagcatataagaagcaggctgcggccgggatgtctttctcgccagcagttcgcaaagctttgctcttatcaaagaaatcttaatgatttcgtgcttgctggaatgccctttcctgcttaaatccttaaaggaaagaatatagatccaccgtttgatttcattaaatcccagcagcataatggcctgttgaatgctttcaattttctggctcaaacggctgtgggatgagtttaaaaattttaaaatttgataggacagtgataaatcccgctctatgtactctgtcacacgctttatgttaggctgctctttactcagttcgttaagcagttcatagtaagaatagaaatgagtcgataggtcatgcccgctgatgatgcgcggctcgctgaaaaagtagccttggaataattgaaagccgtcttggaccgcctgtttatattcttttcgggtctctactttttccgctaaaaaaatcaggccgcggcagccgtaggtttgcaaaattgttctgcgttccattcgtgttgttttgagaaaatcaattttcaatatatcaatatagctcatgagtttttccagtaagtcctcatcttgcgggtttattgcataaaaatcatcaagcgccagcatataccccatttttttcaattctttgcatctagaaatgagggccggcgtgatcggtatatcttcaaggatttcaatgacaagctgtttcggattgaaggaggtaggaagattcgaaaacatcaggctttccgtaaaattaacaaaacagcgtttcccttccgtcagcttctcaattccgatgtttaaaaagctgttgatcaccaaatctgttgttgcctgatcgccgtctttagcgctatacacgttctcttcgctttctctatacagcagttcataagcaacaacctgttcttttctattaaaaataggctgtcttgcaacaaacaccctcattgatttatcccccttacaatacgcgcggctttcacccctaagtatatcaaataatttgacgaaaattgtctaaacatgaaaaataatatatacataaagaaaactggcccttcgtgaacgaaaggccagtttttctttattcttcctcaagctcttcttcaattctgcttttcacttcgtggatccgctgcattttattgctccagcagtcctcgcttaaatcaaccgggtattcctccggcttgctgattctcttatattcctcccaaagcaggctgaggttatcctgcacatactgctgtatgtctgaaatctcagggttttggtagcaaagaatacccttctcaaaaatcagctcatgaagatccttcgcataaaaattcgtgacaaatttgctgatgaatgtatgaaccgggtggaacattctgagccgcttctgatcattcacctgctcatcataaagcgcaatatagtcgccttcagaatgatggttggactgattaataatgcggtagactttctttctgcccggtgtcgtcactttttcaggattggacgaaattttgatcgtgtcaaccattttcccgtcttcttcaatggcaacgagtttataaactgcgccgagagccggctggtcataggcagtgatcagcttcgtaccgacaccccagacatcaatgcgcgctccctgagcctttaaattcataatggtgtgctcatccaaatcgcttgaagcaatcaccttcgcatctgtaaatcctgcttcatcaagcattttccgggctttttttgacaggtacgccaaatcgccgctgtccagacggatgccaatgaaattaatgcggtcgccgaattccttggcaaccctaatcgcgttcggcatgcctgaacgaagcgtgtcatacgtgtcaactaagaaaacgcaatccttatgtgtttccgcgtattttttgaaagctgtatattcatcgcggtaagcctgcacaagcgcatgcgcatgtgtgccggaaaccgggatattaaagcgctttccggctcttacattgcttgtcgcgctaaagccgccgattaaggctgctctcgctccccacatggccgcatccatttcgtgcgcccgtcttgttccgaattcaagtgcaacttcatcaccaatgacgcctttaatccgggcagcctttgttgcgattaatgtttgatagttcacaatgttgagcaaagctgtttcaatcagctgcgcttctaccaggggtgcctccaccctcataatcggctcattgttaaaaacgagctctccttctttcatggagtaaagtgaacctgtaaaagataagccgcgcaaatattcaataaaatcttcatgatacccgagttcatcctgtaaataactcaaatcgctatccgtaaacttgaaattttccaagtattcaatggctttttccaagcccgcaaatacggcatagccattttcaaacggaagccttctgaaaaacagctcaaaaatcgctttcttttcatgaatgccgtctctccagtacgtttccgccatattgatctgataaaggtctgtatgtaatgacaggctgtcatctttaaatccgtactctaacactgtttttccccttccttactctgccacttgcgctccgatgctgtttgcaaaatgggaaagagcccatgcgtgcccctcctgattaaagctggcaacagcttgtttatgcacaacaatcccaaaacctttgttgtatgcgtcaacagctgtatgcaacacacaaatatctgtgcagacaccggcaaggtgcagttcgccaatctgccgctctctgagtttgagctctaaatcagttcccgcaaaagcagaatatctcgttttttccatgtagtaaacattaggctcatgttcatgtttctgatatagaggcaaaagctttccgtacagatcttttccttccgtgccttttatattatgcggaggaaaaagacgggtttcagggtgatattgatccccttcatcatgagaatctactgctaatacgacgtaatcaccgtttgtgatgaattcttcagttaaattgacgatcgcctcttcaatcattctgccgggctccccgcaggtcaattttccgtcactcgccacaaaatcattcgtataatcaatacaaataagtgcttttttcatagccggcctccccgccatcagtatgagaacattatatcttatctccagttgtaagtgaattgccatgaacaaaaagacaaacggtccgtttgtctcttaagatttcagcactgaccgattataaatgtcgtcctgaatatatatcaattcacgattcacagcgatgtcagccgcaatgacgatgcctaaaggcgtatgaaactgaagatcagatacaatcttgaagggcactccgtaccggttcgccatttggatataaggagagtaagactgatactgaagctctccattaatcaaaagggtgacgttatggctgtttttcagctcgtgctccgcctctttatacggtttgcttctaagcacctgtccttttgtcagtgccaaaacgactctttctcttagagaacctaaaaacaagtggcgctcgtcaggctttgtctccaaaggcccatacattccttgctgcaaatagagatccattttatcttcactcaaaagcctgtcctcccgtcttgtttgtcttcattatcacctgatcaggcaggagctaaactttcaagcgccgtttacatttctgttacccaatgaatgatttttttggccagctcaccagcagggatttcctctgtatgccggcgcaacgacgcttccagccgttcaggcagagttgctttatcttcttcataggaaatgatcgtgctccactccagctgcggtaccgctacaagcgtgcgcagttcttttctgttttcatgcagatacacgtccgtgatcattccggtttgcgtattgatatttgcttttctgattttcataacatgacctctctattcaaagactacccatattatacaataaaaaagcaacagcctcttgtgaaaaggctgttacccgttaaacgaaactgtttcatcagtgatatcggcatctttgaagagagttttactcgtttggttgttaatcttcacaaaatcaccaagctgaaatgtgcctgaccccgcccctgaatgagcgacgcttttgggcgaaatcgcaaatacgtctccaaagcttgccgcggcattatccgtaactgacatgatataaatcggccccacaattgcaggcatttccccacctccgcattgatttacagcatcatatgcaaagagccgataatggtgccctcctattcagctggctttgctttttcttcgagtcgtgaccgctggcgcagcttgatcaaacggacaatattcaggaagaacgccttcactaccgcataaaccggcaccgctaaaatcatgccgagaattccgccgaagcttcccgctccgattaatagcaaaataatcgtaagcggatgggtattcagccgctttccgatcacaagaggagacagcaggtttccgtccagctgctgaacgatgacgaccacaataatcgcaaacagcgctttggccggcgagtccataaaaccgacaatgacagccggcgcggcaccgagaaaaggcccgacatagggaatgatattggtaatcgccatgacaatcccaagaatcagggcatacggcagtccggcaattaaatagccgataaaacacgctgttccgacaaaaagacagattaacagctgcccctggaaatatgccgcaagcgtatcggataaatctttaaaaatctttaagccttctgtccgataagaagccggtagaatttttactgccaaatgcggaaagcggtgtccgtctttcagcatgtaaaaaaggataaatggaacagtaataataacaagcgtgatgtttgtcacgacaccaaacaccgcagataaactggacgtgatattttgcggcaggttttggagaaaacttgtcaatgactgttcaatttttgatatcgatacataatcctggttcatcatccaggtaaaccattgagaatgggacaaatcctttgtcagcgcctgaatctgttttatataatcaggaaggttgttaaacagccctgtcacctgtgaggtgatgataggtccgactgacgctgaaataaaggcaagcaaaccgataaacagtaaatagatcaataggatggataatgtccgcggaatttttttctcaagcaggcggacgaccggattaaatatgaaatacaaaattcccgcaattagcatcgggaaaaacaatgtcgagataaaaacaataaacggctgaaatacaaatgaaacttttgttgctacataaataatcagcaaaacaaataaaatctgcaatgtccaaaaatggacttttgatttcaacaagctttgttcctcctagtttttctttgtctgtcagataaaagaacttataccccatcattgtaacaaaaatgaacccatatcagaactcttaatataatgaaaggagtgttggtgatgaaggccgtgacatacgatacagattcagaactggcttatatctatgttcttcctccgaaaaggaacaggaatatacggtctgaggagcttaaagtcaatgattgtatcctgctggatatcgaccaagacggcaaaattgccggattcgaatgttttggtgaggcagcacacctctgtgccccatttgccgggaaatcccggctatatgtaaaagattcagacggttatcattttcgggtctgccagcatgcttcagtccgttcctgctatacagtgtacggcgtcactttctgtttttcagatggtgactatcaggaatttgccggttttgaccttgacggaacaatgtatcatagtgcgtttttacagcgcttaactgaaaaataggacgtcccggtgtacgcctatttttcatgcgcaagcactgttagacccgctcactgtaatctggggtgacggaaatcatgtgctggattctgatcaaacaaacagaatttcgggctccttcaattgtgatatggtcaggtttaacatcgatcagtctgcctctgaccgtatctcgtactgtctgtataacgaaccttgagccgatgagctttttaatggtctgatagacataaggatcgactaaagagaccagttgcggactaccttggttgaccatatttttatcccctttgtgtgttttatctcagcttatgccgcgcttatggataatgacacaggcttacctgataaaacaaaggggtgcggagattttaggagaatacgtttggaagcggtgtaaaggaagtatcgatgaagcggagacagcgaagaaagctggcgctgttccgtacttatacaggctttatcacggatgcctgggcttggtcgattaattggtccagcttttctattttttttcgtgcggttgaaggatcaatttggcggtaatgatgatggccgcccggctcttcatccagttcgtccgcttttttgacaatctgctgcagtgtgtttttatctaattcgccttcaggcaaataggaatctgtatgaagcaaaatggctagtgcaatctcttttgctgctttcggttcctcgccaagccgaatcagaagtttatgcgcccgttccgcccctttaatggcatgaatgtcatttcttttgtatttctcataatcccactttccgtctgtataccattcataatggccaatgtcatgaagcagtgccgcttttgctgctaaatcaggattaatgtcagccttcacagacagcctgtatgcatgataagcgcaggcaatcgcatgtgccacgccggaacgctgaagatatttttgtgcaattggatgggtgaaaacatccattaatgtaacctttctcatggaaacccctcctttagatatttttagaatcctaacataatttgcagagaaactcaattcttatgtcacatcattttgatcttcttatcatcattgttataccctaaaagcaacgtttcagtcagtatatgcggctgttcaataaaatgcgctggctgtagccttttgtataaaaaaaagagcagaaaatatctgctctacaaaaactctttaatatcataaatgcggccgttttccgtccctttttctagtaaagaaagcagcgtgccggcaataaagtccggactgcgaaggcttcctgtttcatttaatttccggaatcgttcaatgtggtggaaatcctttttcgatgaagaacggatgacggcctgcatctcagtgtccatcactccaggtgagaacgaaatcatgttcactggcagctcttcatcctcctgttcaaatccgaatgtcctcgtaaacatgtcgagcccggcttttgaactgcaatacgcgctccatcccttatatggatttttggcggctcctgaagtaatgttgacaatcgtctttttgccgctgtatgaagcaaaccgttttgtaaacagctgactcaaaagcacgggcgcagtcaggttcagctgataatggcgctgaagctcgtcaagagacgcttcgccggcacgtttgatcggcgttaccattccggcgttattaataagggtaataccagaataacgatctgaatcgatggatgagagcaatgtttcaaattgctgttcagcttcttcgagattgatgaggtctatttgatgctgcgttagtttttcatgagagacatccgttttcgttctggataaggcatggacttcatgccccttttctaaagcctgtaatgcaatggcttgacccagcccttttgacgctccggtgatgatataaagttccattggaaacctccttttccgttattattgtacggcaccgcttttacacaacacaagcacgcggcctacgctttcttgttttcctgcgctgtgacttttgggatgaggaacacgatgcctgcaattccgagcaggatcagtacgacatagatcatcggcagcagcaatgatgatgtttcttgttcatcttctgtttccgttgatgatgtctttgttattggtttatctgcaaatgtaattccaagctgtttcgactgggccgcaatcgtgttggaatcctcggcatttgttgatgtaaacaaatcttttatcagctcggcgtccttgtccttcggtttatcaaaagtgatatccttttgttcctcaggcagttctgttttttcttcatagtaggtatcttcatgcaaataattcgtatcgatttcgatgtcttttttctcatactggtttggcgcgacatctgtattttcttcagtttgggcagcagctgcagagggtatgaaaagggaaaaagagagcatacaaatcatgatccccttttccatgctgcgattacgcttcatacgtttcatcgctttctgctgtgtgttcagccatcagccggataatcagcggcagagccgcggcaatcaccgtaatgatcagcagaactgttattcccattgtaaacaagtgcccagtaccgtactggatgtcgatatatactttcgaaaccggatcttcaaatgtaaagttcggcatgatcaaatcaataagcggtgcgacatagaataggatcattgctgctgaagcaacccagccagggattgatccgaatctgaatgccgtccggatgaaggcagagcttgcgaccagcaatagaatcgtaaacaccgaccacttaatcgtctgatcgtccggcagtgaataaatattcaagccgaacaagctgatcataagtccgacaaggatattcagaattccgaataacgctcctttgacgagaagcggtgcgttttggtaatacgagctgaaatagccgattaacagactgctgatcaacacaatgacaaggatgacaaccggaggtaccgtctgaattttttcttccggaacctctccgctgattttaagcggattcgctaagtaatcatatacatagccattgttttgcccgtctactaatgtatttccgagtatgccgtatacgtcatttcgcacgagtttcgtggaggcgacatttttcccccagttgttgtttaaggtgtcggctttcgcttgaacatcattgacgctttgctgcatgttggttgtgtaatcaatgatgccggactggcgatcagacaatgaacccatcatgtctgacatttgcagcacttcctggccgaccgtatcttggacactcagtgccatggtgccagacagcccatcgttgctgaacgtcgcagattcctgtgttgcgcccgttacaagctgttctgacgcttttgcggcactttcagagattttcgtcagttcgtcgagaacacctgcttgagagtcacggatatagccgctgtagtcgtccgcaaatttggtcatgccgtcgatgaagctgttaatatcctcatctgtttgcatcgtgttgtttttgagagcttcccagctggctgattcttcaggtgtgagagccaggactgatttgacgttgccctgctggccgtcaatagcgccggcttttgcagcactgtcaatcgtaccggataatacagagtcataaacagacaaatatttatagtatctcattaaagcggagatgctttctgtattgatttctcctgaaaattgaagctgatctttattttcaagctcgcgaatcgcactgtaaatcccttcaaactcccgcttccgtttcgcttcgagattttcaagtttaccttcgagctttttcactttgtctttcaggtcatcaatttcatcagtgagaccattcatttgctctgttagttcctctaacttctttttcaactcttcattatgagcagtttctttttccttcagttcttcttcaatttgcttgattcgctcagacgctttgctgagctgttcttttgctttggcgatatcagaaatgtcatcgtttcctggttgctcttggtccccaggctccgtcgtatcttcgccgctaccggtatctcctgaatctccggttccgccttcatttgccagcttgataaattgaagggctgaatcagaagatgcagtctgttcggcagatgtgcccgtttcagtttttccgctgtcggacgcaccatcagaggcatcgccgttctgctcctgaccgtctgttcccttctgctggtcttgatcctgagtactgccgtccgtttgtccgtcattaccggtatcactgctgttattgtcgttccctgtgtcgccctgtgtatcatcgggctttgtactgcccccgtcatcaggtttttctggattatcagtggacggatcgtctggttcagtacccgggtcctccggtgttgggtcctctttttcaggctccttcagattgtctgaaatatcctgaatatcagcagcgatatttttcagttcttcacgctgtttttcaagatcaattttgagttcttcaggatcttcttctttagggtctttatctttatcattgttgtcagaaccatcgtctatgactgggtcgtcccctttcgcaactgtcaatgcctgacgtgccgggacaagcaattcatacacctgatttagtgcagcctgtcttgatgcggcctgatattgttcgattaaattactttggatttttgccatgccaagttcctgctgtgacacttgcccttccctaatttgctgggcgtttgccagcacattactggtttgtccgagctgtgacttcgcttggccgatcccagttgccaatccgctcatgcgttcgctgaactgattcgccttttgctgtgcctggatggcatccagacctgtccggatttgctgctgtgttgaatcctgggctgccaaaagcagctttttctgattttcttgatattccttgtatctttcaactgtatcaatgaattctttcagcgtatttttggcttcctccgctgtagaagctttttcttttgtcgtgccttgcgcttcattcattgatttcttcagctcatcgattaaatctttttgctgtttgatttcacctgctaaatcattagagcttggtttgtaaaagttgtacatgacattctggaattcagattctttattgacgattttgtcaaattctcctctgatgttgtccactttttgcgacacaaagttccagtataaggctgacatttttttgttcattgtcttttgggcatcctcaagctcacgctgaactttttctttgttgaccgcattcaggttatcttgaatgctgaattcaagcgttgctttttgtggatggtctttgtcatagctcaaaatgttttttgagaagtctgagggaatgtagacgatcgcatcgtatttttttgacgcgagaccggtctcagccgcgctacggtttacgaccgtccacgaataatcaggacgttcacccagaacagccgctacttccttgccgaactgggcggatttgtcctcttcatcagactttacctcatcactcaatacgccagtgtcttcattcaccaccgcgatttgccgggtggaattgactgcttttttcgtcgggtcgtctccgataaatcggaaaaacaacaccggcagcagcaaaatgatgatgacggcggatattaacttgatcaagctttttcgttgttctgtcatctagcactctccctttcagcagaacataaaggaatttgaactttttgctccttcccgttttccacaacatatccgaagcccggctgaatctcaggctcctgtctttggtacgggagaggaatgacattttgctcagactttttcatcagcagaatcgcgtggcggatttgcttcatctcagtcgtcaaggagtcatagccttttgagaattcgctgtggtttccgcccgggataaagctgaacccaagatgagcgtatgatttcatgaagttagcgagacgatcttgtattctcgtatcaatcgtctgctggaatctcgttatcccgtcaatcatcagcaccacttgtgagaatcgaagattttgcgcgtctccttggcggacggcttctacatacatggcttctcttgttttgaaaatgtcttctgctgtttcaatccactgctcaatatcttctttcgtttccaaatatgaaacatctgattccttcgcataatgagataagccgcggtcaatcgagtcaaacaggccgatcatttcggtttcatcatcaatcagatgttcgagcatgacttttaggacgtttgttttcccgcgctgagtctggcctaaaatcaggcagtgcttatgcttgcccaaatcaaaatagactgggctgactgtttcttcatgaagcccgatcggtacagataaaggcttgcgttccagcttgaagcggagagaaaattctctcgttgtcaggctctcaggcagcatcggaatcggtgccggctgctccaatgaagcaaatcgtccttgaagtttctgtacgtctgatttcagctcgttgaacatgccgatatcatcatcggcgtcaacaggcaggaacatttgcgcgaaataaagctcttccttttgaatgatgacgcgtcccggaatcggctcaagattgaatttcggacggccgtaaatggaatatccttctgattgatccatgagataatggacaacctttgttttcaagttatttaacaatgactggcggacagcattcacccgcgttgctgtcagcataaagtagatacccaagctttgtccgtctctggaaagctggacaaattccgattcaagctcatgcatctcatccttgactatgtcaaagttgtcaatggtgataaaaatgaatggaagctcttcttcgctcagcgcattgtacattttgatgtggctgatttctttttcccggaacaaacgtttacggcggtcaatttcttctttgatgcgaatcatgaacttttcaattttccttgactggtccatcaggaagtaatccgcggtatgcgggagcttcgctaatggcagcagcgttccgtttccgaaatcaaagatatagacatgaagctcttcaggtgtgtatacgtccgcaaaactcatcaggaacgttgcggctgcaatcgattttccgtagcccgaagagccgaagatgccgatatttccatcttccatcatcttataagcaattggcgcctgtctttgcagatcaggttcatctacatacgcaaagtggaaatggtctttttcgtttgaagggaaaagagtgcgcggaatacgttccgcaagcggcggcagccaagggcttggcagcttctcaattcccatttcatcttggatgcgttcaatttcgtcaactacagcttcgatttcggtttgaacgtcttttttcgcgatatcttcggtatcaacctcagaaagcgggatcagacccgtatctgtaacgatcgcgatttcatcctcggtaccgtagacttcctctaagtaaggcgccccgctccatgcagattggaaaagctcatacacttcattgtttccgacctgcaaatagccgcggcctgttacggtaatgtttgcggcatcgctgtttttcaaaatttctttactgtcggtggcatcctggaccttgagcgctactttaaagcgcgagttactccagatctggtcgtcgatgatgccgcctggcttctgtgtcgccaaaatcaaatgaactccgaggcttcgtccgatacgcgcggcactgacaagctccctgataaaatcaggctcctcgcttttcagctcggcaaactcatcagaaattaagaacaagtgaggcatcgccacttctgctttcccttgcttgtatagctttgtatagtcattgatgtgattgacttgatactggtcaaacaggcgctgcctttttttcagctcgcttttaatggaagcaagcgcacgcatactgaagtttttgcttccttcaatatttgtgatcgtgccgaggaggtggggaatgttgcggaacggctgcgccattcctccgcctttatagtcaattagtaagaaagccgcttcatgcggatgaaaatgcactgcaagtgacaagatgtaggtctggagaaattcacttttccctgatcccgttgtccccgcaagcaagccgtgcggaccgtgtgctttttcgtgaaggttcagatacacaatgtcatctttccctttatagccgatcggcactgacagcgacttcgacgattcacttgtcagccatctttgctgaatgccgatttcttttacttccttcgcatgaaaaagctccaggaacgataccgtttccggaatggaattcgtaatgccgacctggtggttcagcgtccgcagcgtgcgtgagaaccgttcgttgtcctcacgctgatgatgatcgagacggaacggaattcttaccgcttttttcttttgtattaaaatgtcgccttcatgctcattaatgtagcggacaagagttgtaatgttttccgacaagctttcctttgtttccgccgcgacaattgtcgagatgcccagatgctcatgctgtccttctaaatattcgagaatgacatgctcagagatcagctgctgattcgtgatgacaaatacaaaatgcggtttgaactgcagtttttctttgtcatcttcgagatcacgctctctgatcaattcgtaaagtgaagacaagagctgatctcgggtttgctcattataaataaatccttttgcataaatatggggcatttgaaattgcggaagccacttcatccactcccagtctttatactcttcttcatgaaaaataaatacaaaacgcaaatcgtgatagctgttaaagaacgacagctgtccgattagctggtgaatctcatttttcacaatttgcgatttaccgacaagccccatcggaccttctgccaaatcgaccgtcaccggcgcattgcggatatctttatagacgcgctgcatgtgctgcgatttctccatgaggtcatcgatatcacgattcgccaagtctccgccgctcatattgatttcatagcttgacggaactgttcccgtcccaagccgcagctggagataatccttgctttcaagtgatttttcccagatccggtcactgatttcacttgttaagtatttcatttgttcaaatgaaggaaagtgaaattcaagaacctgcttttgcttttcagcaagtgcctgaagctctttccgcttattgtctaagtaaagcttatatacacgctcccgtttttcctcgcgttttttccgctggtttttatcccggaaatattgcactgtcgaggtaatgagagtcatcataaacatcgccaaagaaacgagtataaatatgccgcgcggctggatgatggcaactacgcccatcacgatcagcatcacaagcggaggcaggatgacgagccacagccctctgttggtttgatcgctctcctgagagggaaaactgaaagaaacgcggtcatccggcagatcgtataccatccgcggcgttcttctgtactgcggatattttttctgcatttctgtactcggtttgaccgtttctgttaacgctgtttcaaactgggcataatgaacaatttctaaaaggtcttgttccgtcaccctcatttgcgtgaagttccagaatatctcatcccccggcttgagcggcgtattggcgttgattttctctccgttcaagaagatcgttccgctttcaggtcggaccgaccagctgccgcctgcacgaagcaaagaaaacgtgctttgttctgcaaatgcaaagtcttgcggattcagataaatatctgcattcgttttttctgaggaacatacaatttcatcccggtttcccgtaaaataaacggatttctcaggttcactgcccgtcaatatcaagcgtatatcctgctgatccgtttggagagtaaatgatatatccgcctcaatcgtgccgagacaatcatttcccaggaaaacttcgtattggccgccggattcctttcttttaagagaaatcactccgctattaaatggaatggagctgatcgtaacagaatccttcacatcaggccctatggtcaccggatgagacgacgggaggttagacagatttaatttttgaacgttattttggtaaaaaacccataatagactcaaatggcgaacccccttacggccgaatggcagcatgcgatgacctgcgcttcatgtctcacgttatttgtcatcttttttctcatctttcttttctgtttcttttttctcgtcttcttttttcttctgttcttcttttttcgctttttcctcggctgcggctttttcttctgccgctttctcttctgcttgtttttcttcgtctgtttgtgtctgttcttcgcttgtatcgactaacgatgtttcagaattagactgtttattttcttgacgttctttttgcgctttttcaagctcactatttactgagtcaagttctttttgtatgtcttcatcatttgtatcctcagataaaagctgctgtttatatttagctagggcaaagtaaatataatcattgtattcaagcttacggccgatactgatcgcttctttgtattctcctcgaccataatcaatccaatataagaaatgctgagggtctgattgaagggtgactaaattattttctatatttttggtttttgcactccccaggttttcgacctcaacataggacgtcgccagctgatactgcaccgattcaggcaggctttccgcatcgtacttggacagtgtgctgatgacttcactgtactgcttgtttaagaacgcacggttgctgtccactatcgcttggtgctttggctgcgcgaaaaataaggcgtacatcgaataaataagtgccggtacaagcaaaacaatgagccccaagccgatatatcgctggatgttccacttctttctcgggatatgtatgtatgtttttgctttggcttcgagctcatcaatatgggtttgaatcagctcgagcaaatcatcataggattcagcatctaatatcgcctttgcctctgcggagaacgtcagcgtttcattgaatttcaggtagtcttcaaacgcaaaagcgccgtcaactgccaaagccgctgccgctttcagctcctgccatactctttcctcatcacgctcgtaaggaggaatgctttcttttactccataatggagaaaataaggcgtaagccctttatcgaatacaatgttttcaggagcgacaatcaaattcagcctcgacagattgtgctgctgtacggcttgaacaagctgataggcaaactgccatttactttttttatccttagctttcatgaagcggaatgctttataggaggagggaggttggattgtgatgattacttcatcatccgtcacatcgatttctttatgaaaaaatggatttatatctttgatcacgttagcttcaagaccgtcgagaagctttattttttcccgttgaaaggtaaatgtatagccggcatctgttttctcggcaacagcttctaattggttttctaaatatgatttttgttcacctgacattcaaccagatcctttcataatatttcaagccggtctccgtttgtaatgccgcaatcagacagcttgcattctccggaaaacaccttatccttgttcaccactctgatccagtgcccttcgcgcggaggcatagatacgctttgggcctgccaagcaatatcaattacttttttcaccgggtggtaatctgacaatctgagatcaaagacactgccgttataatgtttcaaatctattgtaatatcaatatacatttaggatcacccttacatagaaagagcgccgtcttcttttgaatcaggcgctccttccctttcatactgttatccgcggatttgatttgcgatgtcttggtcagtagactcaagtgtatttgctgtttgatcaagctgctgattcacatcttgaagcaaatctgacattttgataaatgaaggtttgagctgctcgtattgatctgcgaacgcttcgcttgaagcaccttcccacatgcttttcaaatcagagatcattcggtttaaacgatcaacctgatttaatacttcttggctttcaacgccgtattgcttcgccatcgctcttagctcttcgggtgtgacacgaattaatcctgccatattcctcattacctcctgtgccatcagcctaaatatgggctaattcacttatttttagaacgtcattattataaaaacagtttttcggcatagtcaaacaaatatgttttaattttacaaaatgagtccaatggtttaccccgaatcacttaaaaatgacatatactgtaaagtaaataggtttattttcttaatcttctcttcattctccgaataatccaaaagacccaaataactccccaactcccaaaaaaaacctttcagaaaatttgatgctacagcaccatttctgaaaggttcaattttttctttccttaattagtctcgcctccgatgactttcttagaagattaataggataagctgtcgtattatatgaggcatacaactgtcctgcaaaaaggcgattacaccgccaaatgtatatagaacgtttctctcatgaaattgtttttttgcttctgttctttgttgttgattttcacaaacaacaacaatcataataaaaggaaggggatgagatgtcaaagagaaatcaagcacgaaaagtagggagatttatgaccatgccgaatgatccgtttaaatatagttttgacagacttgaagatgtggctgatcatatcagcgacgttctgcggtgcccgatcaccatagaggatgttaaccacaagctgcttgcctacagtacacacagcgactgcacagaccctgcccggacgtctaccattattggcagaagggtaccggagaaggtgattaacaagctgtggaaagacgggacaattcctgctctcttaaaaacggaccagccgatcagagtcaagcaaatcgatgaagtcgggctgagcaatcgcgtcgctatttcgatttggaaaaacaagcaagtacttggcttcatatgggcgcttgagatccaaaaaacattgtccgatgaagatctgctgacattgcaaatggcagcaaaagcagtgaaaaacaagcttctcaaacttcaaatcagaaaaacgaaaaatgaagaacgcagccaagaatttttctggaaaatgctgaccggacacatccatcaggaggatgatatggcggatgggttccataagcttggaatggccgctccttcagagttttccgttatgatcatccgcataaatggcgagctgactgaaaaaatcgaacagcagctgcaatatttacaggaaacgacccagcaggtttacgtgctgctggcgaccgtagattccaatgaacttattatattaacctcacccaaaacagatcatccttttcaagatttaaaacagtttgctttaagtacgcaaaaacagctgaaggagcggtataaaatagaagacgtttctatcgcttttggcggaatatacaactctatttcttttgtctcccgctcctatcaggaagcattgtccgtcttaaaaacgaaggaacggttcgctgaagagaccaaacattttttcagcttttctgagttaggcatttatcaatacttagatgtcttaaatgaaaaacggaaacaggcgggccattataattactcgctttccaaactggaacaatatgaccgggatcaccagtcaaatatggtagagacgctagagcgctttattgaagcagacagcaacgtgaataccgcttctaagctgttaaatatacacgttaatacgttgaattaccgactcaagcggatcagccagatcgctgaaattgatttgaaaaatgtgaatcaaaaattcaccatctatttagatatcaaacttcggcacatggatttgtgaaatttcacaaatccatgtttttttattttcttaatcaaacaaagaattttccaaaatatcaagctacactaaaaatatcacagatacaggaggagacagatatgatcataggggttcctaaagagataaaaaacaatgaaaaccgtgtcgcattaacacccgggggcgtttctcagctcatttcaaacggtcaccgggtgctggttgaaacaggcgcgggccttggaagcggatttgaaaatgaagcctatgagtcagcaggagcggaaatcattgctgatccgaaacaggtctgggacgccgaaatggtcatgaaggtaaaagaaccgctgccggaagaatatgtttatttccgcaaaggacttgtgctgtttacgtaccttcatttagcagctgagcctgagcttgcacaggccttgaaggataaaggagtaactgccatcgcatatgaaacggtcagtgaaggccgggcattgcctcttctgacaccaatgtctgaggttgcgggcagaatggcggcgcaaatcggcgctcaattcttagaaaagcctaaaggcggaaaaggcattctgcttgccggggtgccgggcgtttctcgcggaaaagtaacgattatcggaggaggcgttgtcgggacaaacgcggcgaaaatggctgtcggcctcggtgcagatgtgacgatcattgacttaaacgcagaccgcttgcgccagcttgatgacatcttcggccatcagattaaaacgttaatttctaatccggtcaatattgctgatgctgtagcggaagcggatctcctcatttgcgcggtattaattccgggtgctaaagctccgactcttgtcactgaggaaatggtaaaacaaatgaaacctggttcagtcattgttgatgtagcgatcgaccaaggcggcatcgtcgaaactgtcgaccatatcacaacacatgatcagccaacatatgaaaaacacggggttgtgcattatgctgtagcgaacatgccaggcgcagtccctcgtacgtcaacaatcgccctgactaacgttactgttccatacgcgctgcaaatcgcgaacaaaggggcagtaaaagcgctcgcagacaatgcggcactgagagcgggtttaaacaccgcaaacggacacgtgacctatgaagctgtagcaagagatctaggctatgagtatgttcctgccgagaaagctttacaggatgaatcatctgtagcgggtgcttaattcacaatgagcttgcagaaagatttctgcaggcttttttattttttaaaaggaaaaaagagaccatttcacgaattatgactatgaagttgatcataaaggaggattcatatggctgttcagcaatatggcgtgttaaaaggcatagtcttagacatgaagcgggaaacagatgatgacagtcctcatttccaagtcaaaatgctcggtgaagagaatacgtattacaggtgcgccatcaatgtgatgtccagttctgaggaatctgaagtattgtatttggctgacgatcagtttgattcgggctcaattaccatccttccgaacatgccgtatggatatacaaggatcaatgaagcaaaccgtgaagtggcactggattatgtgcggggcaatttgtttgacccgcgggaaatgaagcctttgcctcatgaaatcacaggacctgataatgatttaaatgattttattgaaacctatatgaagaaagcacaagatgagaaagcgccggtttatatattcggttcaaaattcggccctgaacaggctgcagataaaatattcggctttaccccgactaacggaatgcacaatatccatatgaatcaagggaatgcaatggatacgcgctggaaaaaagacaacggctcttggcatgacgggggtattctgattcagtttgcagatcagtgggccgctgtgtttttagcgtttttatcccaatcttggtgtaccgatgaaaacggaaacccggtcagagattgtgatcatacccaaacgtctgcgtaagatagaaaaagagactgcggcgagcagtctcttcggaagtttgttgacaaaatcctaaagcgttttaaaagctttaggattttgtcatgttttcagcgtgattgaaaacccttgaactctaggaaagatgagcattggagcggagcgaatgttctaattcgtgagcaccaacgcgcagacttggcaacgaatgcgagggtttatcgacacgctgaagagactgcggctagcagtctctttttgatcagattacacattttcaacagtctttaggctgtttggcctcatatcgctccaatgcgattggatatagtccaaacaagcttcacgccctttttgctcatgaacgactgtccagccgcttggcacatctataaaaccgggccatagggaatattggccttcttcattgatcagcaccaaatatgtgccatccgcattttcaaaaggatttgccattctatttctcctcccttatttattcaactcttccagtttgacagcgagaaccttgccgatttgagccagaggttccggctgacataaatctttatgacggcagtcgatgtcgatttgttcaatctgtctgctaatataaggcttccaagagtcaggttcaatcgggtcaaaccattcaggaatgattgttgatctgaaaaacaaaacatttccatggaaggttttcggcttataggaacctaaaatgccgacagaattgacatacgtattcttcaaatttaaaatgaccgtttcatccaggctcgcaagcgcactgccgtcacggcgaagaatctcaatcgccgcttcaaaatctagcggtttgtcccctaagctgtctggatcgtacccgcctaacgccagaagggcaataagcgcttcctcatcatccggtgcctcttttataggaaggaagtggttcggataggcgtccagcatcaccaacagggatacttcttctccttgattttgcagctgggtagccatcgcttgaacgacattcccgcccagggaccagcccagcagatggtatggaccttttggctggaccgttcggatttgtttaatgtaatcggcagccatgtcatcaagtgttttcggaagctcctcgcgctgcccgattccccgtgcctgcaagccgtagattggataatctgttcctatattggtcatcaaaccggcataacaccagctgagcccccctgccggatgaacacagaataaaggaggcttgtctccacttgttcggagcggcagcagaacgtcaagagcgctttggcttgatcccatttcaagtctttcagcgagcccggctacagtaggtgcttcgaacaagttgccgatgctgagttcaacgccgagcgcttcacgaatgcggctcatgagctgtacagcaagcaaggaatgtccgcctaaatcaaagaaacggtcatcaatgccgacacgcggcaagtgaagcacctccataaagaggtcacagagaatttcttcctgtggcgttctcggtcctcgtcctgtcactgccgctgcgaaatccggagcgggcagtgctttacgatcaagctttccattcggtgtcagcggcaattctttcatcatcacaaaggccgcaggcaccatgtaatccggcagtctctcagcagcatatttgcgcagttccgccgtatcaaatgtttcttccgaagggatgacataagctgccaaccgtttatctcccggctgatcctcacgaacgattactgccgcatcttcaagctgcggatgctgaacaagcgcggcttcaatttctcccaattcaatccggaatccccgaattttcacttgatggtctgcacggccgacatagtcgagagaaccgtcagcgcggaggcgggccacatccccagtgcggtacatccgggtgcctggaggaccgaacggatcagctatgaagcgttcagatgttaaaccaggccggcctagataacctcgtgctaaccccgctcctgatacatacagctctccggcaacacccggcggaaccggctgcaggcgttcatccagcacgtatacaccaagatcgggaatgccgcagccgatcaagctgtttgcccgtaaagctgccatgcttcggtctaattcgatatagctcacatgcaccgtcgtttctgtaataccatacatattgataagctgcggtctattttcagggtggcggttgtaccaatcctctaaacggctgagttcaagcgcttctccgccaaaaatgacatagcgcagactgagtgcctgtccgagatccggctgttcccgttccgcctgcataaactgatagaaagcagacggtgtctggttcagaacggtcacaccctctttgacaagcaggcgcagaaacgcttctggcgatctgctgacgtggtgaggcacgattacaagacgtccgccatgcagcagaggaccccagatctcccacaccgaaaaatcaaacgcataggaatggaacatggtccagatatcatctgagctgaaacggaaccagtgctcggtcgctgcaaataaacgtgttacattttggtgaggaatcatcacaccttttggaacacctgttgagccggatgtataaatgacatacgccgtattcaaaggggaaagcggctgagtcctatccttattttttggattacctgcagggtacgtgtttagtttctctgccagctcgggatcatccagcacgattttcggcacgttttcaactggcggaatgtgatttgcagctttagtgttcgtcatgataaacgcaggctgtgcatcttttagcataaaagcaattcgatcagccggataatccggatcaagagggagataagctgccccggcctttagcaccgccaataggccgacagccatttccaacgatcggggcagtgccaatgccacaaattgctccggcccgacaccttcactaattaggaatcgggcaagccgatttgctctttcattcagctctgcatagctcagtgcctgatcttcatatacaacggcaatagcatcaggacgtaaagcagcctgcttctcaaactgctctggcaaacttgcgtgcggaatcttttcagatacactttgccaatctgtcaccatgctgctgcgttcctctggcgcaagaatatccagatttccgatttgctcgtcaggatcagactcggcagcctccaacagccgcatcaaacggtcagcaagagcctgagcagtttcccgcttgaaaagatcagtgctgtattcaagcagtccttccattccgtttggtgtcccgtcagcaaggcgatcttcactgatttccagcgtcaaatcaaacttggcagaaccgacactgttgattcgcaggctactctccatatcaggaagatgcaattcagcgtccggtgtgttttggaacgcaagcatgatttggaataaaggatgcgtcgcacgcgaacgagccggattgagcacctctacaagtctctcaaacggcagatcctgattgtcataggcggccagattcacttcccgtactctgtctagaagctcacgaaagcttgggtcaccggacgtatcagttctgagcaccaatgtattaatgaacagccctacaagatcgcccagcgcatcatcattccgtccagcgatcggactgccgatcggaatgtcggtgcccgccccgagccttgtcaataaagcggcgagaccggattgaagcaccataaacaggctcaccctatttgcgcgagccagctcctgcaatcgcttatgaagctcgggctcaatacgaaaatgaatcgtatctccatcatgactcggctcagccggacgtgaataatcggttggcagctcaagctgatcaggcaggtttttcaaggtttctttccagaaagcaagctgtccggcaatcaagctatttggatcatcctcgtttccaagcagttcttgctgccaaagcgcatagtctgcatactgcacagcaagaggcgcccattctggagatcgtccgtggcagcgagccgcataagccgtcccaaggtctcgggtcagcggtgttaaggaccagccgtccccgacaatatgatggacgagaagaagcagcacgtactcgtcaggaccgatcacaaaaagctcggcacgaaaagcaggttcagctgcaagatcaaagctgtagcgtacagcttcggcaagccgatcagaaagctccttctcagcaatttcagtaacatgtaactcgggacaggcttgatcagcatctaaaatatgctgataggatgtcccctgtgattcagggaagattgtccgaaggctttcatgacggcagacgaggtcataaagtgccgctttcagcaatccttgatccaactcacctgacaaacggacagcaaccggaatattataagtaggactcggtccttccagacaatgcaggaaccatagccggcgctgggcaaatgagagcgggatcttttcaggccgctcagctctctgcaaagcgggacgtgcactctgcgccaaatcaagatgggcagcgagtccggctactgtcggttcgtcaaagagcttggcgataccaagttcggctcccattacctcgcgaatgcggctcatcagacgggctgcaagaagagaatggcccccaagctcgaagaaactgtcatcgataccgacgcgtgccaaaccgagaacctctgcaaacaagtcacacaatatctcttcctgaggagtccgcggggcccgatcactgacagatgtgctgaagtctggtgccggcagtgctttccggtcaagcttgccattaggtgttaacggcagctcgtccatctccacaaacgccgccggtaccatataatcaggaagactggcccccatataacgacgaagctctgcagtatcaatagcagtatcagcgactacataagccgccaatcgtttgtctcccggctgatcttcccgtacgacaaccgcggcctgttcaatgtgcgggtgattggcaagcacggcatcaatttctccaagttcaattcggaatccgcgaattttgatttgatgatccgcccgcccgatataatccaaagacccatcggcgcgccagcgggcctggtctccggtccgatacatccgagttcccggcggtccgtatggatctgcaacgaagcgctccgccgttaaatcagggcgatggaaataacctctggccaagccggttcctgcaatataaagctctccgacaacgcccggcggcaccggctgcaatccattatcaagcacatacacctgcgtgttccaaatcggtttcccaatcggaggaacgccctgcaacccttcttcaagaaaagctgcggcagaccaaatcgttgtttcagtgggaccgtataagttcgtgactgaacaatgaaggtcttgaagcgcctgcaaaagaccgctcggcagcgcctcgcctcctacaagcactctaagcccccgaagtttctcaggttcactcgttaccaaagcgtgccacagtgtcggtgtcgcctgcatgatgttaatatcgaaattttcaatcatttgagctaatgcctgcggctcacggatcgtttcttttcttgcgatcacaattcgcgctccgctaatcagcggaagatataactccaatgctgaaatatcaaaagcgacagtcgtcacagccaacagcctgtcttcttctcctagagaaaacgcctccttcatggacagcagaaaattgtttaagcttttctgtgtcacaacgactcccttcggtcttcctgttgatcctgaggtatagatgatatacgcaggatggtcaagagaaaccgatacatccggattttccggcgaatagcgttttataatctcctgtgtaacagcctgatcaagcacaagctccggtacagccaggttatcaggcagactggctgctatttcctcagtcgttatgatgcatgaaggtttcgcatcctccagcatgtaagaaatgcggtcggctggaaactccggatcaagtgggagatacgccgcaccagtcttgagcacaccaagcattgagaccaccatctcaggggaacgcggcagcgccaaagcgacaaattgctccggaccaatccctttttcgatcaacagacgcgcgaggcggtttgcctcttcattgagctttcgatagttgacttgaatgtcatcacacatgagagcgatacgttctggcgtaagaactgcctgcttttcgaacatgtcctgaaggctgaccagcttctcggattttgccgtctcattccatttagaaatgactttttctttctcctctggcaacagaagctccatttgcccaatcagcatgtcctctccggcagaagccgtttgcagcagctgcaaaatacgctgctgatgaagcttaatatcagactcactgtatacctcgggattcgcatcaacatcaattcgcagcccgctgccgtctgttctgtcatatacattgattgatagatcatcaacaggaccggctgaaagattatgcgttgtgccccggacgccggcaaagtcgagaccgtaatcaaacggcataagattgatttgagggccaaataatctatgattttctcctatcaatttcagatcgcgccgaagctcttcatggcgatacttatgatgtcgccgaatactgcggatttcccgggaaatttgctgaatcagttcagaaaagctcatcgaagagcttaccgtcagccggagcgggagaaggttcatcaccatagccggtacattcagtgacgcggaccctatccgacccatcatgggcaggccgagcacaacatcctcagagccggtcatacggtgcacataaacagctgacaccgcaatcatgacttcatgccagcttcctgagaaatagcgcgccgcttcttttaacgcgtttacatcagacggaggcagatatgccgtatgacgaagaaaactgttagatgttcttggcgcccgatcagccaagctcacaacttcaggtgcatctgcaaaacggtccagccagaattgacgatccttctcatactgctctgatccgcgataatctgtatcctcctccaaaatggcctggagagacccaaaggaacggcctttagctgtttgtccttttataagcgcagtatatgtacttgccacacgctgggctatcagggaaaaaccgaagccgtcgatcgctatatggtgaatgcgctgataccaaaagaaacgatcaggcccggcaataaacagagcttcattgaacaaagggtcataccctaaatcaaccggctttgctaaatcagctttcatccagtttaatgctgttttttccggatcaggctcagagctgacgtcaatgacgtgcagctgtacatccggagacgggtttatcatctgccaaggcccgtccatattttcaccgaagcggacatgcagcgattccgcttccttgatcacgtgccgcaaagcttcttcaaaaagagcaatattgactggtccattgatttctatatattccgctgtattgtagattggattgtccggatcaagctgctgagcaaaccatatgccagtttgcgccccggtcaaagaatattgaagatcttttgtatcaggcatccgtttgtttaccctccttttataaataatccgcgtttggcagcacttgctggctgcgggttgtgagcaatttttgccattcttcgatcgttgggcgttcagccaattccacgaaagtcacctctgccccttcacggcgccattgttccaccaatgtcatgatccttaccgaatcaagaccacgatcgagcaaatcctcttgatctgtgatgtcttccggtgtttcttgtagaagctcagcaatttgtttacggatattctcacatgtaaacacgttctttttgccagtgtttgctgacgttttttgaacgtctgccggcgcattctgcagctgatcaagaagactgtcagtcatcacggtaaacgcacagcgtccagccgcatagtccagcgccatttgatgtttttctaatgaaaaatcagcaactgcatctcccacaaaaaaggctttaatatcctccataaatgcttcacatgctgtaacaagacagccgatatgggcataaattcctgtaatgatcagctgatcgcgtccctctttgcgcatcatttcaagcagattcgttctcttaaacgcgctgtatctccattttgtcagcacaagatcatcatcctctggtgccagctcggttataattttctcctcataaggaccgctgtttaatcccgggccccaaaagtctgtcagcagcgcacggtcatccggattttggcttcccggctgtgcggtatagacaacaggaatcccaagctgaacacattgattcttcagctttcgtatattcgctgaaagctctattaccggagacgctcccgctgtgaaagcatcgacaaaatagttttgcatatcgtgtattaacaagacagcccgattcggatcaggcacccatgatactttgttttgcggcatatcagatgctgtcggcatttgatacggctgaatggcaggtatagccatatgaacacttcctctcaaattgttgttttatttttttaatcctgcaagaagcttctcggaaatggcttcacggagcgcttttttgctgacttttcctacccctgtctgcggaaaggattcgacaaattcaactcgatcagggattttatatgccgccagtccgcgctctctcaaaaatgctttgagctctgcggcttttggggcttcatcccggggaataatgaacacacaagatctttcgccaagaaattgatcaggcatggagaccattgccgcatcatggacagccggatgcgccagcagatgattttccacctcttcagccgcaaccttttctcctccacggttaatttgatccttcgcccggccttcaacgacaatatacccgtctcgtgtcagcctgacgatatcacccgtacggtaaaaaccgtcctcagtaaatgaagcggcgttatgctcttctgccttatagtaacctcgaattgtatacggtccccgcgtcagcaaatggcctgtttcaccaggttttacgtcgcgatcatgatcatcccaaacacgcacttcatcatatggggacatcggttttccttgggtgttgacaatgatctcctcaggatcatccaatctcgtataattgacgagaccctctgccattccgaacacctgctgcagcgtgcagccgaaaacagcttttaccctgcgcgcggcttcagcactaaacttggcaccgccgacctgcaacacttgaaggctggataaatcgtcacggcgtgaggatgccgcatccatccataccatcgcaagaggcggaacaagagcggttatcgtgaccttttcccgttcaattaaaggaaatgcgtcatctggacttggagaaggagataataccactcttcctccagcgtataatacgccgagaacgccaggtgagctcagcggataattgtgtgccatcggcagcgcggccaagtacaccgtgctgtggtcgagccagcagacctccacactccgcttcaggctgtatatgtagtcatcgtgggtcctcggaatcagtttcgatagcccggtgctcccgccagaaagctggaggaacgccacatctgaagatttgacttcaggcagttttacaggttctgtatgcaaatcctccagcggcaaaaattcctctgcctcacctgcgacaatgatgtttttcaaagtcggcagcttgctttgaacctgtctggcaagcgaacggtagtcaaaaccggaatatgcgtcgggaatgatatatgcagccgcttcagcaaactcgcaaaaatatgtaatttcactgcttcgatgagaaggcagtgcgaagactggaagcgcccccagacggaatagcgcgaaaataacttcaaaaaactctttgatatttggcagctgcaccacaacacgatccttctgttgaatgccgagcttctgaaatccggcagccaggcgatcagcccttgtgtccagctctcgatagctccaatgggtgtttccgcatgtaatggcaatgcgatcaccatatttggctgcccggtcccttaacaaatctccaaacgtctcaccggcccagcagccgttctttcgataggtctcagctaactcatcaggccaaggcgtaaatcctttcagcatgttgtatccctccagcaattcattctgttcatatgtgatccacgcccattgcccgcagcattgtccgaaactttgcggacgtctcctgaagctcgtcctcgggctttgaaccggccacaacaccagctccagcatacaggcggagtgagcgttcttctgcttctgcacaacggatggtcacgatccattctccgtcaccggcatcgtcacaccatccgaccatgccggtaaagaaaccgcggtcaaatggttcaatgctgagaatcgcttctcttgcaagatcagtcggtgttccgcagactgctggcgtcgggtggagagccgctgccaattcaagtgcggttacagacgggtcggaaagctctcccttaatcacgctggacaggtgccacatcgtttccgttttgatcagtgaaggcttctccggaacctccagcgtccggcagaaaggtctcagcgctgccgcaaccgcgtcagcgacaaccgcgtgctcatgaagatcctttgcggaagaaagcaattcagctgcccggcgctggtcttcaacaggatcattactgcgcggccttgagccggctaatgggttggaaacgacctgtgttcccatccttgaaacgagaagctccggacttgctccgagcaatgttcggcggggagacgtttcctcctgactggacacgtctgcggcaaacgtgtagccatgcgagttatgctgagccagatggcgaagcaattcatccgtctgaatcggttcaggcgatgtcaaatgcagcgacctggacagaacgattttgctgagtgttccatcggcaatgcgtgccagcccttgttcaacaccatttttataatcctcaggttcaggaacaggctttatgtgatatgtatgcccagcctgctgttccttttcctcatgatcaaattgaagcggtcctgaccagcgcacttcttcaggtacaacgagccgcgctgcttttacttgatcaaaaggaacggccccgacaacaagcggccggctttgccctgattgttttgcctgacgtaacgcctctgcaattcggccagaaagggtttccatttggttttgcccgtctgcctccggtacgatttcacatatgcctttcgctaacagtacacgatgaggagacgctaagaaaaaggcgcccggctgatattcatgaagcaaatgctccgcttttgtttctgttataacgttttgatccaacattctcatgaacctcctttaaattcagttacacgcctaaggtcgcgccgccatctacgcataaattatgcatcgtaatatgccctgcctggccagaaaccaaaaagagcaccgcatccgcaatatccgaaggcttggctagttttttgagcgggatccctgttttaaatgtctcaagtgatccttttatgacttgctccgctccattctcgtcggcccataatgaccactgcatgtctgtttccgttgatccgggagatacaatgttgcagcgaatattgtattctgcaagctcaaggccaaggcatttcgtaaacatcacagccgcagcctttgaggacgcatatgccgccatagatgttcttggtacaccggcagcattcgatccgactgttacaatcgaacccgatcttcggtccatcatatatttgctgactgaacgcgaggcgttaaatacgccagtcgaattcactgagaacgtcgcctcccattcctcatcgctaagcgaatggatcagtcccgggcgaaggacacccgctacattcactaaaatatcaatcggccccatttcacgttcgatgcgcgccgtgatctcatcaatcgccgcgctgtctctcacatccgcaggaaaagcttctgcatggcggccttctgctttgaggctgctcacaaccttttccagcttttcaggattataatcaaccgccgcaatatgtgcgccttgactagcaagcgtccgcgcaacagcttcgcctattccttgggcagcccctgttataaaagcaatttttccctctatactctttgcattcatatcatcaattcctttcttcgctctaaatgccgaacagacatccagcgaaaaagactgctgcgccttgaaaaacgcaatctattgataatgattatcattatcaattataaaaataatcatatccaaatgtcatgtgacagtcaaatataatttcagtgacaaatatttttttaaaggcaaggctgagtatgtctcagcccattgatagatgcggtccgtcagggtgaagcgcaaaacgcagcgccctgctgaccaaaacaggaagaactgaaatatgtccttctcctgaaaactcgcaaaattctgcccgtatgccttgttcagataaaacggccagccgctcataaagctcccttgcattatcattcatccggcttttatgatgctgctctaattctcctgcggcaagcaggatattgataggctgattgtttttcttggtgagagagacgaaatggtccgttttctcgagaataaacggtttattccaatgaatggacggacttcctgcgatatacgtttgaaacgcatcgggctttgttagcagcacctgcagcacgaaaagccctccgagcgaatggccaaagattgtttgtctttttttatcaatctggtaatctcgttctatctccggttttaaatcctcttcaataaatctgaaaaagccctccgctccgccatgctccggccattctctgccgtcgggcctttccggcagcttcgattgggctgttggcattgtaaaatcccggtggcgtgctgaagagaacggctccgctgtctcatagccaatgccgacgatcactgcagggatcaccccggttttttcgggtcggcgtccctgtattcgaacggcttccgtcatcgttccgaagacagaattggcatccagcagataaatcacaggataaccagtgggtggcggcggcgtactaggtttcgagataaaaatgtgataggtacggttttcattgcgtgaagacatcatacgcacttccgtaccaggaatcgtaaatgcgtttgatgtcccgctatttgtccggtctgttgtttgctctttcatgcagtacgacattcctctccttaaactaaaccgcaatgtatgataatgattttcactatcaactagacacctcaaataataggttttcttccaaagaaagtcaactttttcccgaataaaaaaggcaccttgatcaaataaggtacctgcagactatcaatatggaagtaaaaacctaataaagatgcggattgtcctatttgaaatagaaccttaatcccatgtaaacctttgattttgccaagggtcgcctctcatgtgatagccattccgctcccaaaagccagggtgattttctttcgtaaattggatgccgcgcagccacttggcgcttttccaaaaatatagatgcggaaatacaccccgcagcggaaagccgtgttcaggggttaaaggttcgtcattatgcgcataagccagaagggaagtttccgctaagaaatcatcaagcggcagattggtcgtccagccctcttcagcatgtaaaataacgtagcccgcttcttcttttacacccgctttttccgctatatcacaagcccgcaccccttgccacacattatcaagccttgaccatcccgtgacacaatgaatgtcgttttttgattcataccgtggaaaggctttgacatcttcaaagcttagcagcatcggatggtcaaccaaaccgtatacttgaagattccatttcgtcatatcttcgtaatatgggacatctccggtatgaagcacaggaaatgaagtggtgacgttttgatttggcggcactcttccagattgatcggactgtcttgtttttccgaaatacatatgggcctcctttttgttaacctattttaaaatcatgttgacaatctttttgttctttattactctatgattgtgtatgtcaacctaagggggaacaacgatgaaacaacgtaaacttcgtgcgggagatatggcgctgattggcatgttcgccgcacttatggctgtcggggccaacattacatcagtagcaccctttttacaagtagccggcattccgctttcgatgcagccgtttttctgtctcttggcagctttgcttcttggcagcaaacgagcagcgattgccatgattgtatatgcacttgtgggattggccggagcgcctgtgtttgctcaattttcagcaggcttcgcaccgtttgcagggaaaagcggcgggtttattatctcatacattccggcagcatttgtagcgggatggtttttagaacgaaacattcagccaagtaaaattcgatttctcattgcttcacttatcggaacggcgatcatgtatctcatcggcactacctatatgtatcttgcactgaagctgtggattcatacgccagtgagctacggcacggcttggggctttatgatttggtttatggtaaaagatacagcgctggctgtgatactgtcgtttatcgcaccagcaatctaccgctctattcataaagcaaccggctttaacagaaatcacatatcatctacgtaaaaaccgttctattggacggttttttatcataacgagaaaaggctccccagtaaaggggagcctttttcctataaaacaagcgctgcaatccagccaaagatgacaagcggaatattataaaatataaatgtcggcacacaagtatcccaaatgtggtgatgctggccgtccgcactcaaacctgaagtcggcccaagcgtactgtcactggcaggtgaaccggcatcgccaagcgcagcagcagccccgataatcgcaatcgttgccatcgggctgaatccaagctgcatgcatagaggcacgaaaatggttgtgataacaggaatggtcgcaaaagaagatccgatccccattgtaattaataagccgacaatgagcatcagcaatgcgcccaaggactgactgtgtccgataaaaccagctgacgttttgaccagtgactcgacatctccggttttcgtcaatacgtttgaaaatccggctgcaacaagcatgacaaagccgataaaggccattaaaaccattccatcagtaatcagtgagtccgcttcatcacgcttcatcacaccgctgacaaacagaacaatcagaccagcgagcgcccccataatcattccttctactcccaaagtctgagataagtaaagctggacgccgagtgacacaacaatggctagaaccgcgataccaatgctttttctcgtatatggcgatgcttctgcacctgaaatgtcttttgtttcatattgtttcggtttacggtatacgatcactgataaaataaggccgacaaccatacctgcaactggaataatcagtgcgtacggaatatcagcaagcggaacgtttaacccggcatccgccatattgtccttcagcatgccttggaagatttggccgaaacccaccggaagcaaaatataaggagccgttaagccaaatgtaattacacacgcgatcagacggcggtccatttcaagttcattaaagattttcaaaagcggcggaatcagcaccgggataaacgcgatgtgaaccggaacgacgttttgcgaaaaacaagatacaattaaaataatcagcacaatcagcaccttagaaagtgctttttttcgagaatcttccttatttccgattaatttaacggaggcttccaccattgcgtccggaagacctgttttcgtcaaagcggcggcaaacgcgccaagcatggcatagctgactgcaacggtggcatttccgccgagaccgtctgtaaaagctttaaccgtttcgccaagaccgagcccgcctgttaacccgccggccaaggcgcctataattaatgcgataacaatattgacacgcagcaggcttaatacaagcataagcaggactgcgatgacgactgcattcatgatgatacccctccaaaaatcctttagtttgctaatgtagtagataaataaagtacgaacgtatcgtatcataaccgatccactttagtcaactaaagatttcggaagaaaaaatccctgccgcatcatacagcagggatttttcattactcgtttttatcttcttccaatgtaaatcgctccgcaagtgtagccagtgttcttgccataacgccagtagccccggccggcccgaagcaggttgctttattggcagtcgctgttcctgcaatatcaaggtgaacccaaggtgttgactcagcgaattcaccaagaaacgttcctgccataatcgcatgtccctcgcgtcccggtgaattgttgagatccgccatttggctgcttttcacgcgttttttatccttctctgttatcggcagctgccagattgcctcgccgcactcttgtgcagcatcagctacctgctggtaaaagctttgatcatttgtcattgcaccggttgtttcagttcctaatgccacaacgacgccgccggtaagcgtagctacatcgacaagaactgacgcgccatgctgtttcgcgtatgtaatgccatctgcaagcactagccttccttcagcatccgtattaaggatttctattgtttttccgcttaaagatacgatcacgtcatccggcttcatggccccgccggagatcatattatcggttgatggaataacgcacagcacgttttgctcaggacgaagctctccgatcgtttccatagcaccgagaaccgcagctgctcctcccatatctgatttcatgccgacaattccagatttcgttttaatggagtagccgcctgtgtcaaaggtaattcctttcccgactagtccgacgacgtcctcccattcctttttgccctgatatttcaacacaatcattttcggcggttcggtggagccttggtttaccgcaagtattccgcccataccgagctcttccatctctgatttctccaatatctcacactcaaaatcatatttcgccgcaagctcttcagcatacgaagcgaggtcagtcgctgtcagcatgtttcccggcatattcacaagcgttctagccgaatttgtcccttgtccgtatgcctggccgacgcgaagcccggcctgcacttcctgtgtatcttcatctgttacaacatacacggcttcaatttgtttgtcaggctcatttgatttgtgcttataatcctgcacctcataggaagcaagcaggcagctctcagctaaagcatgagcggcatcggctggaggcacgtcttccgaaataaacgtatcaagcaggacagcagtttcttgttttcgatctttatgaatggcttgaaaaacatgagcaaaacgttccttcgcctgttcaaacgaataattagcttctctccccagaccaacgaaataaatccgtttcatacccgcagaagatggagggaatacttttgatacttgattcggtttcgcagagacatcaccctcttttaaaagctgtgtcagatggccttcgagcatttcatcaatttccaacgcttttcctgtcagctggcttttttgaaaaagcccgaccacaagggtttctgtatgctctgattgttgaaccgcataaaacatgaggcttacactcctaacgtaatgggtatttgtaatgaacaatggtataataggaaaaacattctttccactatacttattttaacaaacaacagtctaagacttgcttttttcttttgaaacacgaaggatttttcaaatagaaaggatgtcgccgatggaacttttaacgaattttcctttattatcaagcctggccgcaattatttttgctcaggtcatcaaagtgcccatacagtttatcgtgtccagaaaactggactggtcgctggtcacaagcacaggcggcatgccgagctctcactccgcagcggtcactgcgctttctacaggcgtagccttggagcatggattagactcctcactctttgcggtttccgccattttcgccgtcataaccatgtttgacgcaactggcgtcagacgccacgccggtgagcaggcaacagtcattaataagcttgttattgattttaaccgtttcgtaaatgaagcgaaggacttccctaaggctgcagagaaagaaaagcaaaaaaagctgaaagagcttctcggacatcagccgatcgaagtctttttcggaggcctaacaggtattttactgacattggtactcgcttactttttcatgtaaaaaaacgctcctgctttcgctggagcgttttattctttcacagttttatattgatttctgaacacttgcaaagattttgtttcattgagcttctcaagctcatcctcggtaatctttcccattccctttttaatcacatatacatcaagggtttttttgccccattcattgtatacatctttgactgtctcaaagtacagatcaaggcggtttcccttaatagctgatcctgtgtcggccacaactccgagaccgtagttcggaatgaataaaattgttccgatcgggaaaacggacgggtcagcagcaaccgtggaatataaatcccgtttcactttcacacctgaatatgtaagcccgtataatggatcaccgggatttttgcccgtcgactcagctcctgctgtgtagcctgttgctgttactctttggactggatattcatcccaatcaaatgcctcttctaacggttttgttttatcctcagccgcggacgtggtttgtgtttgtttctgctgcaatgcttttaatgtcagtcctgcatgcttcaagtgcttttcctgatgttcctgcacccattttgacaagtccttcgcttcaattcctgacactgataaaaatgtcgtgccaaatgcaagcagaaataaacaggtcatcagcaaacgtctgatcatattcaacatcattcacctctcctccgaatcattgttcccaagtggagagagcattattcaaaatggtgaatgagctgaacgcataaaaaaagctttctttagaagaaagcggcatttaaaacatttgatatcctctttttctgagcatgttgatcgctataccggacacgatggcgccggccaaaccgctggctaaaatcagcacatcggcagccgctaatgataagacacgatgaaacagactggcaaaggattctcccggcgactggacatagctgatcagcttttctttgctgataatgaaaaggcatacaatcggataaatcacagccataatccaagacattctcagcagcatgtttaataagaaaccgattccaaaaaacaagacaaaaaacaaaacaattgagatgattacgactggcagactaatcaacctattccaccccctgcgttgtttttagtgtaacgcgggggctgaaataaagtcaacggctggaaaaagaatgactgtcttttcctgtcccctggcaagacggacaagtctctgaaccgccgagaatcaattgaaaatatcctttccctgaacaaaatgggcatgcatgtgaagcggttgtcgttgcagttttcatctaatcatcacccttttttctcaattttctgataatataccatatcaagctgtcaacaataaagtcagatcatgtgacaaatcttttgatgtaagcggaaacatacttgttttcctctcgttctctttttattttggcgttttttaataaagaaaacccgcttccgcgggtttttagaaaaacttgaacttgccttttttcaatgtcagtccgagtccgccaatcataaacagcgagcggttatcaatgacttttttcataaacgaagcgggcgtgcctttcagctttctgccataaacaaccccaaccgcgttatgctcgccaagagaagccactgttcccttaatgtccggcttgaattcctcaagctctccgcctttaataagcctgccaaggtttttagcgaccgttatgccctgctgcattgcaatttgcgcagtaggcggatacggacgctctgtatcttcattcataaacagcgagctgtcgccgagaataaagacattgtcatgtcccggggcgcgaagatcagggttgactttcacccggccgcgcatattttcaaaaccggcttcctccacaatcggatggccgcggacacctgccgcccaaacaacggtttgcgatttgatctgctctggttcctcatcttttttgccgactctgactccttccggggtacattcttgtacagccgtgccgatcttgaactcaactccgttttcctcaagataatgtacggcgtaatcaacaagttccggatcaaagcccggcaaaacggtcggcgctgcttccacacaaatgatgcggacaaggcttctgtcaacgtcatattccttacagagctccggcacgcgagcagccagttcgccaagaaattcaattcccgtaaatccggcaccgccaacaacgatcgttaacctgtccggccgtttttccgcttccgtattgtaagtcgcaaactgcagctcaatatgttcccgcagcaggcgcgacgtgttgatgttggcaatcggaaacgcatattcttttaagcctttaatgccgaacgtttcaggcacggcgccgagcccgatgactaaataatcgtactgcagttctccattcgcaagcacaacttttttctcatcaattttgattgcctttacggtatcctgtacaaaattcacccgtgactggttgattacatcttttatctgataacggcagcggtcatgatggagcgtacccgcgctcgcttcatgcatccatgtcgtttcataatgataattgtgtttatttacaagcgtaatgtcagcatcattcggcccgacatacttcgtcagccttgtcaccgtcatcaatccgccatatcctgcacctaaaatcacgattttgggcttattcaatgccatcacatccaccttctctttttttgcttttgttagacccataataaaatcatcatttgtgttagcttcagcttattggcgggattttatgaaatatattgaaaagttttttgtgaagtccttacccgtagcactattatcatgtttatccggctggcccaagaaacattcagaaaaagatcatttcatttggttattatcgtagcggcctgcggaaatattttcaagaacggatgggcacgttagatccttacgattttttctgctgactcgtcaatttgaacggcaatatggtataattaataacaattttcatttaggaggcaattttcgtatgcgagaggatacaaaggtttatgatattacaattataggcgggggaccggtcggcttattcaccgctttttacggcgggatgagacaggcaagcgtcaaaattatcgaaagcctgcctcagctcggcggacagcttagcgccctataccctgagaagtatatatatgatgtagcgggattcccgaaaatccgtgcgcaagagcttatcaataacttaaaagagcaaatggcgaaattcgaccaaaccatttgtctggagcaagcggttgaatctgttgagaaacaagcggacggcgtgtttaagcttgtaacaaatgaagaaacccactactctaaaacggtcatcatcactgcaggaaacggcgcattcaaaccgagaaagctggaacttgaaaatgccgagcagtatgaaggcaaaaacctccattacttcgttgatgatctgcaaaaattcgccggcagacgcgttgcgatccttggcggtggagattccgcggttgattgggcgcttatgcttgagccaatcgcaaaagaagtatcgatcatacaccgccgcgacaagttccgtgcgcacgagcacagtgtggaaaaccttcatgcgtcgaaggttaatgtcctgacaccattcgtccctgcggagctgatcggcgaagacaaaatcgaacagctagtgcttgaagaagtgaaaggcgaccgcaaagagattttagaaattgatgacttaatcgtcaactacggtttcgtttcatctcttggaccgatcaaaaactggggcctggacatcgagaaaaattccattgtcgtgaaatcaacaatggaaacaaatatcgaaggcttctttgcagcaggtgacatttgtacatacgaaggaaaagtcaacctgattgccagcggcttcggtgaggcaccgacagcagtgaacaacgccaaggcttacatggacccgaaagcccgcgtacagcctcttcattcaacaagtctttttgaaaataaataaaaaaaaggagcttgtgtctgcgacacagctccttttttatttgaagatatttatataattcaatgcagttcctacaaccagcgcaatcacaagggctgcgactacccagatcattgccataataatgcggtcctgaatcttttgggacttcggtgttttttcttcgttttgggccatcttattcgctcctttcctatgtccatgccataaagaaagcctggtgctgaacgaccaagctttgctgaacgtatatcattcgcgttttgatccgctctctaagaccattcgttaaaactatgatacctaaactcaccctgcatgacaagcttcggcacttgcaccacacctgccagcaaatcataatgtttgacatcctaaataaaacagagtacattatagaaggcgaacatttcatatattatacttttaaatattcgtttttaggagtgaaaaccatggaaaacgtatttgattacgaagatattcagctaattcctgcaaaatgcattgtgaatagccgttcagaatgtgatacatccgtacgtttaggcggacgtacatttaaattgcccgtcgtccctgccaatatgcagacgattatagatgagaagctagcgattcaattagccgaaaatggctacttttatgtcatgcaccgatttgagcctgagacacgaattgattttattaaagatatgaacgcacgcgggttattctcttctatcagcgtgggcgtcaaagatgaggagtatgaatttgtccgccagctggcagaagaaaatctgactcctgaatacgtgacaattgacattgctcacgggcactcaaatgctgtcattgaaatgatccagcaccttaaaaaacatttgccggacagctttgttattgctggcaatgtcggaacgccggaagcggtcagagagcttgaaaatgcgggagcggatgccactaaagtcggcatcggaccgggaaaagtatgtattacgaaaatcaaaaccggcttcggcacaggcggctggcaattagcggcgctgcgctggtgtgccaaggctgccagcaaaccgattatcgcggatggcggcatccgcacccatggcgacatcgcaaaatcaatccgattcggcgcaacgatggtcatgatcggttcactatttgccggacacgaagagtcgccaggccaaacgatcgaaaaagacggaaagctttacaaggagtacttcggctcagcctctgaattccaaaaaggcgaaaagaaaaatgtcgaaggcaaaaaaatgcacgtggcgcataaaggctcaatcaaggatacactgattgaaatggagcaggatcttcaatcttctatttcttatgcaggcggaacaaaacttgacgccatccgcaacgtggattatgtgattgtgaagaattccatttttaatggggataagtactaatatgcgaaaagcacccggatttgggtgctttttatgtgtaaaaaaatgttatatggtatattttagtaataaaaaatccttgtttctacattctttcttatcgtatcttagcgtcccccaaaagcttgtccaattaaacttgaaacatcctcctcggccagttcgatttctagtcggtgttaataaatacatgacatcaaattttgaaataagtaactccatttttataatttttccagtagtttcgtaaaacccacctagactccatacctcctattaagaaaaagttatttcattttccaaattatacatttataaacttgtcttcttttccactcgattctttagccatctatatacatttgctatattaatttcaaaaccttttccctctaattttgttagagccactgctcctccaaatacctcttccttatcttcctcttctgatagagcttttgttaccagagaagcttgaagtattgttgaatcaattatcctttgttgttgctcaaccaaagtttgaagttgttcaattgtttgagtttgcaactgcactgttgcatttaaaaatattatctgactcttaaaatgctggacgttagccattaattgctgaatttgaaggtcacttgagaagttcgtatatccaatatcatttaccattgatggtagctgcaaataaatttctaatgcttcttgtataatgtttaaagcttcatctgttgattctggaattactgtaaaaagtacattatttgcttgatgcgtaatttctgtagttgctttaatacctatattctttaagaattccgaaaaataaataagatattgttcacatgcaacacgaacatgttcagggaattcaaagatactagttagagtaccttccctattttttaaaatcaactgatttattgcttctcttgttacattgttagcgatacgtaaatattcttctaaacaattattagaattattattacaaataaactttaaggaataaccatatatatcagattcaatggtaatatccatccgttttgcgacatcattagcttcatatattaattcttctgtactaaaaatatttttccatttttcagtttcccaagaaaaatcaattaatatttcaaacattttatcatcaggtgaaaaaataaaaaatatactttgtttcaaaccagtaatatccaattcagttgggatttctattgttactgattttttatattcatttgcaagttggatcttattaaatggcatactggttatacttgaaacaacttcatttgcaatgacttcaaaaataatctcaattttataagtgaagagtttcaccttttctggttccatgatttgtttattaatttctaaaaaaggctcacccttataatctttaattataatcattatcttctcctcctttcagacttactttcatcgctcctttagcgctctatatatagtcgtttgcttatattatttaaactgtattaagcttattctcccttttattcctactaccgaataagtctaagggcatgttgattttcttttagtatatttcccctgtctttatttgtaaactcctctcttcttaacttcttcaattcatttgggtgcatcatatttaagataattggcataatcctaaaaattcaggagaataagtcgtttacatttcaatctcgtagtgtttgtgaagccaagtaacaaggagctccaattttactctcttaaggtttcctgtctcaagccttttgcatttttacctgccataactacgccaatttcttattccatagttgatttgtaatattaatttttggctgttttcttcctaactcttatttaataagaaaacttctagatatttatgtgattgacattaaatccagaaggattgtaattcacaattcttattatattttgcgcactaaacctcagaattcctcaggcccacctacatttgttgctttcttgaacaaagaatcgcagacgcagacgaccagtttacgatagatgaaaatacgaccatagcaaggtttatatacgatatgcacaagtattggtgttcgctatcctgccgccgaagtattcccctaactttacctaggttacatacactttaaagtacaattttcacaatatgaaatctctatcccgctctttaattctttctaaaaagaaatacttatatatttttcaatgcttttccattattcttgccatttgttttgcatttggattttcttcattttgcaactgttcaatgatgttcatataatccgtttcatttcggttctggcttaatttatatgccgcttgaatgtcttccaccttaatcttaaatccaacgatacctttcaattcacgttctaagagttttggagaaagcttatcccataaaacaggattgtcacgatgtttttcgtatttctccagcatgattgttaattcttctgctaattcatctttctctaacatacttgcttttccatacatgtggacagcctgataattccacgtcggaacattttcgcgcgaataccaggaagaagaaatataagcgtgcggtccctgaaacatcacaagcacatcttcacaggcttcaaacgttctccactgaggatttccataagcgaaatgccccgtaatatagtaatgatcatcttttttattgaatcctaacggcaaatgtgtggcaattggttttccttgttctgttgtgacaaccgtaccaaaggagttttcttgtacaaaattccaaatttcttcagcatttgtgactttaaaatattttggaatatacatcatcatccacccttcgaaaaatattatatgagtgttttagccatgattaaatccgtttgttcttcatcacccatataaaaagagtgggcgccggtctgaacaaaccccattttcttataaaaggcaatagcattttcatttttttcccacacacctagccaaatgttctttttattacgttccagcgcaatttctatcgctttattcagcagatgtttgccaagcccatttttttgaaagctgttctttatataaattctctcgatttcaagtgattcagcacccatttcttcagactgagcatcatcgatattgacctttacatatccagcgatttcatgatcaaagtaaataaaaaagaattgcgaagacatattggataactctttttccagctgctcagtgttaaatgcactttctaaataggctttcatattttcaggtgagttctgttctttaaaagtgtcattgaatgtttcaatactcaattgttgaagtgtttgtaaatcttcccggctgcattttttcatttttacactcattgttcggattcagcccctttatttaaaattcaattgtcttgtgtccctttttaatatatttaaacacggaacagatactgaccttgttaccattccaaaaatcttcttcatcatcaactccctatcgtgattttgttgcaaatgcaataaaatataccccgcattaaatatagcgtaactttgctgtatttacaacaaaaatcaaacaacaaatcagcgtttctcttgccgaagtccccggtactctctgcatcatttccccataataaaaacgcctcccttaacgatgatttatcgctaagaaaagcgtcagtaatagttgctatccgtttttagtgcttagcactcttcaggcttgcctgcattcgttgctgttctgaacgaagaaccgcagccgcatgaagcgatggcgtttggattgtcgatggtgaagccgccgccgagcatggattgtttataatcaatcacggtgccgttcatgatgtcaaggctttctttgtcaactagaacagtgatgccgtgctgatcaaacacactgtctgattcactcttttcatgctcaaagcccatgccgtaagaaagtccgctgcagccgccgcctttgacgcctacacgtagaaacgcgttttcttcttcatgctctttcatcatatcttttatatgcaaagctgctgcttctgtaattgttaccgggttgctcatcattgtgaacctccttttaaaaaccggttgctgtcttttattataaacatgatcgtcccaattctcaaacaaggtgttttacaagaaatagacaccctcacaaacggtttcagccggccctgtcatcattacatggccgttatctttccagtttatcaccaaatccccgcctgctaaatgcaccgtgatgtcttgatttcgctttgatacgccgtttaatacagatgcgactgccgctgcacatgctcctgtcccgcatgcctgagtaatccctgatccccgttcccagacgcggaaatgcaattcttgttcattcacggtttcaacgaattccacattgatgccttccggaaatctcggatctttctcaatcaccggccccagtgtcgttaagggtgcctgttcaatgtctgcgatcggaaaaacgatatgcggatttcccattgaaacggcagtgcctgttagttctacttcaccaaatgccatcgtttcattgattgtgtgctcttccccgccgtcaagcatcgggagctcggattttgtcaagcgcggttcgcccatatcgacagtgaccacattcacttttccgttttcgacttgaacctccgctttcacaagcccggagagagtttcaatcagaaaagatgtttcctcaaccagcttatgctcatatgcgtattttgcgacgcagcgcaggccgttgccgcagtttttcccttcagatccgtcattattaaaaatccgcattttaacaggcgcttggtctgatgggcatatcaggatcattccgtcggatccgatccctgtataaacagaagaaacctgaattgcaatctctgacagtttttcttctggaagctgttcttcaaattgattcacataaatataactgtttcccaggccgtgcattttggtaaatcgaaatgagttcataggtgcctccaactttttttctttttcttagtataaaagctattataagcggacacaatacaattatcccccgtttttcatacataaaagctccttgcactgacgcaaggagcttttatcgtttatataaacatgccggcaatggctgcgctgagcagattggctaatgttcctgcaagaacagccttcaggccgagacgcgcgatatctgaacggcggctgggtgctaatccgcccagcgtaccaagcataatcgcaattgatgaaaaattggcgaatccgcataacgcgaaactgataatggtagcagttttcttagaaaactcgccgatgtgcggaccgaagttagaataagcgacaaactcattcagcaccaatttctggccgatatagcttcccgcctgcaatgcttcatgccaaggcacgccaatcaaaaaggcgataggagaaaacacataaccgagaatggattctaatgttacgccttttaaaccgaacaagccgaaagccccgccgagaataccgtttactacagcgattaacgcaacaaacgcaagcagcatcgccccaacgtttaacgcaatttgcagtcctgttgacgctccctttgcagctgcgtcaatgacattggctgcgccttcgccttcatccattttgaaatcgctttttacggtttgcgttttttccgtttcgggtataatcaatttaccaaagactagtccagctggagcagccataaagctggccgccagcaaatattcaatcggaataccaagaagcgcgtacccaaacaaggtagatcccgcaactgccgatagaccgctcgtcataatcgtaaacaactcagagcgcgtcagcccggcaatcaggggtttgatcactaacggagattctgattgtcctacaaaaatattggcagcagccgccagagattccgttttgcttgttccaaggagcttcgacaatccgccgccaatgacacggaaaacgagctgcatgattttcaaatgatataaaactgcaatcagtgctgagaagaaaatgataacgggcagtacacttaatgcaaaggccggactgtctccgacctttagaagcggtccaaaaataaaactgatgccttcattcgcatagtcaatcagaagctgtacacggcttgaaaaccataaaaaaacagcgcgtcccgcttcccatttcaacacgatgtatccaaacgccacctgtgtgcataaaccaacgatgacggttcttatcttaatattgcttttcttttctgaaaataaaaacgcgatagcaatgatcgcaactgcgcccagcagcccccacagaacattcatgaatactcgtacacctcttaaattttatttaaaaaaatatcttttatacgataacaataatattttttgatgtctacacatttttttagttcttttgtacagcaaaataaaaaagggcctgtccaggcccttttctttaaaacattggattttcttcaataaaggtatatatattctcaacaagctcagcaggcgtttcacccatgacgacttctccgtttaccagagcgaaaagcgattccatgcatgtcccgcagtagcttaagcagccatattcaaggacatcaaggttgggatccttctccaaaatcgcccgggcttcctgagagccgtgagccagattgctgacacaaaattcaatcattggattcatgcggtttcacctcacatatgtccattatcgcgaatttttcactattcgtcaaagacaacggatgattcaaaatttattatcgtaacatattatttctcaaataacgttttactaatttgtgttttcaggctaaattgtaggttattttgaaactattattgtgattttagatcaaattcgatataattctagatgttattttacatagttcgtattttcttcaatgtatctatcatactcttcggattaaaggggaattcaaatgaaaaaattggtcttgatcggcggaggttacgggaacatgcgtgttcttcatcgcttattgccaaaccagctgcctgatgatgtttcaatcacgttaattgacagaaatccttatcactgcttgaaaacagaatattatgcccttgccgcaggcacaatttctgaccatcatatcagagtgtcattcccagagcaccctcgcctggatgtccaatacggtgatatcacatcaattgatattgtacaaaaacaagtgctgttccaagatcgtgaaccgatttcttacgatgacgccgtaatcgggctcggctgtgaggataaatatcacaacgtgccgggagcgcctgaattcacctacagtattcaaaccatcgatcagtcccgcgaaacctaccaaaagctgaataatctgagcgctaatgccaccgtcgccattgtcggagcgggcttaagcggcgttgagcttgcaagtgaattgagagaaagccgtgatgacctgaacattattttgttcgaccgcggtaatctcattttatcaagctttcccgagcgtttaagcaaatatgtgcaaaaatggttcgaagagcacggtgtccgcattattaacagggcaaatatcacaaaagtagaagaaggcgttgtgtataaccacgatgatccgatttctgcagacgccatcgtgtggacagccggcatccagccaaacaaagtcgtcagagacttagatgtggagaaggacgcacaagggcgtattgtattaacgcctcatcacaatcttccaggtgatgaacatctgtacgttgtcggcgattgcgccagccttcctcatgcaccgagcgcccagctggcagaggctcaagcagagcagattgtccaaatcttgcaaaaacgctggaatggagaagccctgcctgaatcaatgccgcagtttaagctgaaaggcgtcctcggttcactcggaaaaaaagccggcttcgggcttgttgctgaccgtccgctgatcggccgtgttccgcgtatgctgaaatccggcttgctgtggatgtataaacaccataacggttaatgatagagaagaaccgctgatcaagtcagcggttttctgtatacccatgcttctccatttcctcataaacgtcttttaattttggattgccttcaccgacaattttgtcttctacgagcacaagcggataaaaatactcgtcatttctgattttttccgcaagctctttcgcatgttcattgtcaggcggctcatgaatatcgatgtactgcatctcaaaaggctgatttggatattttcttttcagcgcagcctcaagccactcgtatgtatccttggctgtcggcatattgacacagctcgcacaaacggtttctgccccgtacacgcttagaatgactggtttcatcacttgtagacgcccccttctcctatgtaagtcctttcttttaagtatacagagccaaagggcgtttttatagaaaaaaaccgtttttgtgttgaagtctgaatgtgctataatagggagagcaactttgcaaaccaaacaatagatttttattgttacactgaatataatggttttatgacgacgaaaggagcgaatgtcatgactgaagttgaaatgaaagaacaggtgcaggaagtactggacaaacttcgtccgtttttacttcgtgacggcggtgactgtgagcttgtagacgtagatgaaggtatcgttaagcttcgtcttctaggcgcatgcggcagctgcccaagttcaacaattacgctgaaagccggaattgagcgcgctcttctagaagaagtgccgggtgtcgttgaagtagaacaagtcttttaataaagcagccaggctgatatttgatcagcctggctttttttattagagatattggtcaaaccatgagctgatataattcaggcgcttgatccgctgtcttgggtgtccggtgcgtgacaaattgtgcgatgcattcggaaaacggacaagcttggtttccttgcccatttttttcagagcgataaacagctgctccgcctgctcgatcggacatcggtcatcccgctcgccatgcagtatcaaaagcggtgtctccacgtttgctgcgtattttaaaggagaccggtcccagagcttttctgtgtcctcaaacatgtcatgctcaagctgccagtctgtaaagaaatagccgatatcactgacgccgtgaaagctgatccaatttgatatcgagcgctgggtaacggcagctttaaagcggttcgtctgcccgacgatccagttggtcataaaacctccgtagcttccgcccgtgacaccgagccgcttaggatcaatatgcggatctcgtttgatagcctcatccacagcctgcatcacatcgtcataatcctttcccccataatctcctctgaccgcattcacaaattcctgcccgtagccgtggcttcctctcggattgatataaacgaccgcgtatcctttcgccgccagcacctgaaactcatgaaaatatgtatgtccgtacatcatatgcggaccgccgtgtatgttaagaataagtggatatgttgtctcaccttccatttgtgcaggcctcatcagccagccgttcaccatcacgccgtcttctgtagcatattgaatctcttcaggtattgatatcgtatgctccctgacaaacttgtcattcgcgccagtcagctgtttctcttcctgtccaagcgggatactgtaaagctcactcggtctgtccggctttgtcacactggcaataaagtgctgttcatcaggtgaaagagaaaagctattgatgtactctttttccagacgaatcggatacacaaggccttcaatcgaaatataatagatgcccgtactgccttgatctgtgccgatgacataaaacccttggctgtcctttgtccaaatcgggcgctgttcagcaccaccgatcaatgaatctccaatcagcgcatccgctaaatgaacgtccagcatctcagtaagacatgtgaggcggccttgttcgatatcatagagccacgcctttgagagcgtagcattcttatattccttttcatttccaagcaaagcaagataccttccgtctggtgaaaatgagcttgatccgaatgagccgcgatgaggtgtaacctgcttaagatctccagactccagtgacattatgtaaacatcatgcggcttgctggcatcatctgtttcagttaaattagctgagaaaacaagccatttgccgtcaggagaaaaagcaggatcaccatgatcagctttgtgacttgtcagctcttccatctcacccgactttacgctgacaagcacaagctgggcatacgcacctctcgtcagccctttgccgtcccgtttgtaggagaggccttgcacttcaacaggttcatagctgtcctgctctgttttttctcggtcatcaatgttttctccctctcccaaactgacagtgaccagaatcgattcgccatccggggaccatattggctttgacacgccatacgggatatcagtcagttttctcgcttctccgccttcagcgctcatcatatacagctgtgccgcatcgccttctcgatcagaaataaaggcaagcgtgcacccgtccggagaccatcttgggtcggtgcttcgcttttctccatgtgtccaaggaacagacccgcccgttttcgtttcatagatccatatatttgatgtatacgaatctttctcttgattcacttgtgattttacatatgcggcacgggtgccgtctggggcgtattgaggatcggtcacagagacaatcgctgtgatgtcgtctgcggttatcagctttttcatattcatctcctcctttttacatgtatttcgtttttctaaataaaaactcctttatctccagcaaaaaaagcgccctctgctgacgctgaggaacgcttggcatgatctatacactttttacttgatataaaggatttcgctctattatacttccctctttcgggacggtcaaagcgtctacttcacaatgagggaaatgaagcgcgagctgttcttttagctcttctccctttcctttttcggtcatgacgagaatcgtcgggcctgctccgctgagagccgttccatatgcgcccttcatctcggcgacgtgctctacttttgacagctcaggcacaagcatcgcccggtacggctgatggaacatatccttcttcatgattttcccgacaagcggccaatccttggacatgatcgcagcaatgagtatattgctgacagcacttgcttttacggcgtcggcatatggaaactccttcggaagcacgtctctcgcgtctcttgtcagcacttcgtaaaaaggaatgacaacgactacgtcaatgtcagcattcgggacgcggatcatttgggtctcgtcatcctcatgcaggccgatcacaagtccgccgacgagagaagcgccagcattgtccgggtgtccttcttctagactggctaaatgcagcttgtccgcttcagacagctttaagccgcataattcatcagccagttcaatggccgctacaatcgccgcggcgctgctgccaaggccgcgtgcaagcgggatgtcgctccacaccttcacatggacaggaggtatttcttttccgtacaaatctgcggtccgtttagccacttgatagatcaggttatctgtacccgccggaattccggcgactgtttctgtttcagcctcaaaagaccatttgtcgctttcaaagacggtcagcttcaaatatctgctgagcgccattccgactgaatcaaagccggggcctaggttagctgtgcttccgggaacagtgacagagaacagcatgtcggcttcgttcatacacgggccgctccttttacatattcaaggatgctgtcttcatcagtcggcaatgtgacaggcttgatttctgaaatgtcgaccgctgtgttcggatctttcagtccgtttcctgttaacacagctacgaccttgctgcctttcggaatttctccggatttcacctgtttcagcactcctgcgatagacgcgcaagaacccggttctgcaaacacgccttctacacgggcgatcagctgatatgcgtgaaggatttcatcatcagtgacttcgtcaattttcccattggattcctcggctgcctttacagctttgtcccagcttgccgggtttccgatacgaatggctgtcgctattgtttcaggattttcaatcacttcattgcgcacgattgccgccgcaccctcagcttcaaagccacgcattttcggaaggcctgtgccgtttttctcatgatattccttgaagcccttccagtacgcagtgatgtttcccgcgtttccgaccgggatcgctaaaacatcaggcgcttcccccagctgttcgcacacttcgaaggcagcagttttttggccttcaatgcggtaagggttgactgagttgacaagggcaatcggtgatttctcacagatggaacggacaattttaagcgcatcgtcaaagtttccgtcaattgcgataatctcggctccgtacatgacagcttgagcgagttttccaaatgcaatttttccgttcgggatgatgacaatgcatttcatgttagcacgggctgcatatgctgccgcagcagcggaagtgttacctgttgacgcgcacataatcgtgtcattgccttcttcttttgcctttgccacagccataaccattccgcgatctttaaatgatcccgtaggattgacgccttccgttttgacatgaagctcaattccgagctgctcagacagcttcggcaggtgaataagaggtgtgtttccttcatgtaaagttagcgccggtgtttgatctgttacaggtaaaaattctttatattgatggataagtcctttccacattagctccaaccgttcccttctacacgatatgtgcttttgacttcttgaacgacttccaaatcatttaggttttgcaggatatcactgaaatcagcttctgatgtatgatgtgtgacaattacgatttcagctaactcatcatggcctttaattggcagctgaaggattttttcaaagctcacgccccgctctgagaacacagatgtaattttcgagaatgaaccaacctcatcttttacatgaattcttaaaaactgctgtgcataaatgtcagacggcgatttcatgtttttctcatattgcggtccgacaaagctgttgccggttacacctaggcgcatatttttcatgacagcgacgaggtcagaaacaacggatgtcgctgtcggcatgcttccggctcccggcccgtagaacatcgtctcaccgacagcctcgccgtatacataaacagcgttaaactcattatgaacagcagaaagcggatggtggtcaggaagcagtgtcggctgtacgctgacctcgattttgctgccgtcacgctgagcaatcccgatcagcttcattgtatagccgaggcgtttgctgaagctgatgtcctcgtctgtaatttgggagatcccctttactttgacgtcttccagatccacgttcatcgagaagccgaggcgcgccaatatcgccattttccgtgcggcgtcaagcccttccacgtcagaagtcggatcagcttcggcaaaaccgagatcctgcgcttccttgagcacttcctcatatgggcttttctctttgatcatttttgttaagataaagtttgttgtgccgttcacaattcccatcatttttgtaattcgatctgatgagaggccttcctctaatgtgcgcagaatcggaatcccgccggcaacactggcttcaaagtagatatcgcatccattttccttcgcttcagcaagcagctcggagccgtacacagccattaagtccttgtttgctgtgacaacatgctttttcgatctcagcgcgtcgaccaaatattgttttgtctgttcaacgccgccgatcacctcgatgacgacatcaacatctggatcatcaatgacatcatacacttctgtcgtgagcacttccttcggcaaatctacttctctctttttctctatatcttttacaagcactttttttatcgtaaccggacagccgacctgatgcataagcttatcctgatggtcttgaataattttaacgacaccgcttccgacggtacctaaacctaaaagccctacacgaatcgctttcaaaaaaactccacctttcttttgattgtcctcttgaaaaagacaattgttaactcaacacagacatataagttacaaacattatataagcccgctcctgttttgacaagacagcattaggctgaattttgcgaatgtaaacgcttaacgcattgatatgacaagattctttattttctaattatttttgtcagattttctcctcaccctgagctgcctttgccgagccagctgacgcgtggaacaaacagcttctgcgcccgcatattcatgaattcctgcgctgtattgagaaattgttcataacgcccacagtcattaagaatgaagacaagctgttcttcaaaataatgcttttctgattctgatgacatgtaatagctttctacgatttcaaaataatgaagcgggaaaagcagacggctgtataaaaggcgtttcgaaaatgaagacagcggtgtgacttgctcgtattcctgtaaaaagagaaagccctgctgattaaaatcttgtctgtgatgcaaaaacgtatgcctcatatattcagccaaatcacgggaagcgtggtcaaacacccaatccgccggaatcctgatcaatgattccggtgaccatgtatgcctttccatccgctgatggcatatcgttcctgaatcagcggcttggggcttgtcatccagctcagtgtccactaaatattgtatcgcgttttctgacagtcctaaataatagggaaatgattcgatcatttttttatcgaatggctcatgcggaggggtctgaacctttctctgccaaaatgcttccagctgatcaattcgttttccccacagatccttccactggccgattcttccggccgccttcacctcatatggatatcctcggccttttcggtgaaattccgcaagctccgctccaatggagaacgccctgtttgaataagggggggccgccttcagcagagcgtacgtttttccctcatgttcaaatgtcagttcaccttcttttgtaaagataaaaaccgaaacgtatgggtcactttgttcttgtaaatactgactcatgtaataaagctccgccagctctgtttctgagaattgggaaacggggacaatcagaaagtatgaattaggcgtctgaaagcattgatatgtgtgctggtacatggaaagctgcctgatgtgaatgccgtatttttcttttattgtacctttcaccatgatcacctgcctgttgaattagggctcatcacatcgtagtcatacacagccggaattatgaatacatattttaatccgaagaaggcgcaagaaaaagtcgtaaacttctcaagcattttgtataaactagtaaaaaagattgggtgaagctgatgtcagaaaacgaacaattcagtcagatggaagctaaagcaagagcacggatgaaggagcgcggcgttgaggtatcagacattgccgagcttgtcttttttctgcagaaaaaatatcatccggatttaaccattgatgaatgcacgctgaacgtcaatcgtgttctcgcaaaacgcgaggtgcaaaacgcgattttaacgggcattgaattggatgttcttgctgagcagaaaaaactgtctgaaccgctgcaaacgatgctggaaatagatgaaagcctatatggagtagatgaagttctggcattttccattgtgaacatttacggatcgatcgggtttacgaactacggttacatcgacaaagaaaaacccggaatccttaaacgattgaatgataaatcaaccggtgaatgccatacctttttagatgacatcgtcggagcgatttccgccgcggcttcaagcagacttgctcaccgcgcgcggcatacagaataagggcacccttttagggcgccctttattcaaatgtatggaatccattcagtcagagagtcaatggcgtgagtcggtttttccatatcgtctgtcatatgttctcttttcgttacgcctgtgtgaacgagcagcgtatccatacccgcgttaatgccggccataatatcagtggcatagttgtcgccgaccatgagtgtttcagacacatctgtgccgagaacgcgcatcgcctgctccataataattgattccggcttgccgataaatacaggctgtacacctgtagatacggttaacaccgatgtcagtgagccgtttcccggcagaaggcctctttcagtcggaatcgcaatatctccgttagtggaaataaagcgggcgccatttctgattgccaggcagccgacagcaaatttttcgtatgtaatggaacggtcgatgccaacaacgacaaagtccgcgttttctccgccaaatgtcaggccgttttcttcaatcgcctggcggattccttcctccccaatcacatacacagacgcgtcttttttctgctgtgcaatgtgctgggcagttgccatgctggtcgtgaagacctgctcttctgttgccggaatatcaaaagacacgagcttgtccgctacctgcttcggtgtgcgcgaagagttgtttgtcacgaaaagataaggaacgccgcgatctttcagcgttctgacaaattcacacgcctcctcgattttttccgtgccattgtacattgttccgtctaaatcaattaaataccctttatatgttttcatatccaacactcctgtggctttccagttgttatttaaacgcggaaacaggtcctagctctgtttccaaatagcttctgatccgtttcgggaagtcctgaagagctgtttgatgcgccttgatcagcctgtaaagctcgccgctgtcagcgagcagatactgttgaaccaacgttttgcggtaggcgatcaattttttgagctcatcaccctctttttccgtgacaactttctcatcaacaagtatatccataatgtcgtcatagctgcccgggtcccgcataataaagccgtcaatcatgtcattgcctgtatccaaaatgcattcgattaacagatggcctatacgctgaagtgccaattccccgatttcagactgccagtctgtttgtgagtcaaatagcgccagctggtgctcgaagaaccctagtgttttctcgattttgcttctgtcaacaaaatacatgacagcatcccctttgtgtatatttattttctgatccgtttcaagacaaaatacgcacagccgaaattgcagtattcgtaaatatattcatctaatgtgctgattttcgtttcgaaggttgccttttgattctggtcgtcaaagaagcccttgagccttaactgaccgtatccccagtctcccacaatataatcgtatttatttaatatatcggagtagcgggctttaaaagcctcttcgttgaagccgtctttgaaattgtgcaccaattcaaattcggcattttgaataagaatcatgatctcacctctttttcactcattcctatcataattcattgccccgtccccatcaattgctaaagaataaatcatgcgatttggctaccctacacatgaggagggattgataaatgaaacgaaccgctgtcagcctctgcctgctaaccggactattatccgggtgcggaggcgcaggattggataatgcccaaaatgtccggaatcagacgcagaatcaaaccaaacccgttcatgtgtcggaccgcaacgaggcttttaacaggcataatgagaacgaacaatttggctatgtccgctatcaaaaagaacaatttgacggagaccagcagaaaacgccggtgatgaaccgggaagaaaccgctcacatgatatcaagtttaacggttcagcttccccatattcaagatgctgcgacattggtgaatgaccgagaagcgcttgtcgtatacaaaaccgattctaaaaaccgggagctgaccgccgatcaggtgaaaaaaacagcggcttccgtgataccgcgatactatcacgtgtatatttccgataatccaaaccatatgcagtccgtcgaaaattacagcaatctcggctctggttcaagggatattagagagatcatgtcggggacgattcaagaaatgaaaacctccccgcaaggaagccctgtctcagagaatgaaaatgccaatggagaaacgcgtcaggacatgaaaatcgataggaatgacaaaaacgccagatgatctggcgttttggcattatgcttgggcttgacgctttttagatgcttcgtttacttgttcatccgcatggtaagaggaacggacaagcggaccggcttcacaatggctgaagcctttttgcatcgcgatttcttttaattctgcaaattcatcaggatggtagtatttttggactttcaagtgtttcttcgtcggctgcagatattggccgattgccataatatccacgttgttcgccaagaggtcgtccattacttcaataatctcttcttttgtttcgccgagcccgatcatgatacttgattttgtcggaatgtcaggctgcatttccttcgcacggcgcaaaaattccaatgaacggtcgtacgtcgcacgcgcacggactcttggcgtcaggcggcgaaccgtttcgatattgtgattcaggatgtctgggcgtgtatccattaaggtttttaggttatcgtagtttccgcccatatcagacggcagcacctcaattgttgtgaacgggctttttctgcggatcgcacggacagtttccgcgaaaatgcctgcccctccatctttctgatcgtcacgcgcaacagccgtaataaccgcgtgcttcagattcataagcgcgactgaatccgctacgcgttccggctcttgcagatcaagctcagttggaaggcctgttttgacagcacagaaacggcatgctcttgtacaaacagaacctaaaatcataaatgtcgctgtacgtctgaccgcccagcattcatgaatattcggacactttgcttcttcgcatacggtatgcaggttgttttcccgcatgagttttttgagccctgtatagttttcatttgtatttaatttaattttaagccattcgggctttctgaggtgttcgtctttctttgccaattcccatcatctccaatatccaatatactcaatttctgacacgaaacattctgaaaacgagaaaggtgcagattttagttctgcaacaaaaataatgtttttctaactaaagaaagtcttttctttagacactttaacataggaaaaatttctcgacaagggaagatgattactgacatttttaagccgggttgccgcaaactatgtgtattcaatatgaaaggagattattttgtgaaagttttgttatccgctcttcttctccttttgtttgcatttgagccttctgcgtctggaaaaaagctttcagatccagtgctgtcgaaacggatggaattatatcataaaatcgaagctgtgacgcagatcccttggtatgcgctcgcggctgttgatcaatacgaagaaaacgtgcggagcaaccggaaagatctgcctgaaaaggcgggaatcatcagcatctatatacccgatgatatctggagcgggcctgaaaacccgaatccgaaagatgatgcgccgttaagcattaaagtgtttgacggaatcggaatggatggcgatggagacgggaaagccgaggtcagcaacgatgaagatattttgtatacgttcagccaatacctactgtcgtatggcacagatgaagacaacatccggatcgggctttggaattattaccggcgtgatcagacagtggggattatatctgaattcatgaagctgtttaaagcctacggccatattgatctgggcgagcatgcattcccgcttccgatcagaaccgattacagctaccgaagcacgtggggagatgcccgcggcttcggtggaaggcggattcatgaaggtacggatatctttgcccattacggccttcctgtcaaatccacatgttacggcgtagttgaaatgaagggctggaaccgcttcggaggatggagaatcggcatcagggacattaacaatacgtatcattattttgcccatctcaatgggtttgccaaagggattaaaacaggacaaatcgttgagcctggccaagtgatcggatcagtcggcagctccggatacggcccgccgggaaccgccgggaagttcccgccgcatttgcactatggcatgtacaaagataacggaagaaccgaatggtcatttgatccatacccgcatttgagggcgtgggagcgatatgaataccaaaaaaagaagtaacaaaaagccgcctcttcaacaggcggcttatttgctgcttttttctttttttgaatcggcaccgtcttctttgctgctcggaagctggacagaaggcgtgacacccgagccgccgcttccattataaaactgcggcacttcgccctgcactgctttaatcgatacaggaacattatttgtgacgacagcggttttgctggcaaatggaatgatgaccttcactttaatttcgacaaagatgctgatatcaataagtgcgttatttatgccatacggcttgattttggttttgacatctgtaaaagcgtcaccgattaaattgaaccggaccgggattttcggcccgaggtttccaagaaggctgttgccggttacctgtcccagcggaatgttgatcataatgttttcactggcgccgctgtgtccggtatgggtttccatctctttcaaatgagcctgaagctgctttgtcacttttgttttcacactgtttacaacctgtgtattaaaatcgattgtcgttaagtttccgttttcatcagaattcatttgaaacatatctttcatattttcactgtcagacatatagtcctcaatcgaatcctggatcacctctgtcgctatacgcttcgtttccatctcgccgatgtccattaaaacaggtttgatcgagccattgatcatccaaaggctgaccgttgttgacaggataaaaaagacaacggacaggagcatcacgtaacggaaaggcaaaggtcctctcttgcgaaaagggccgcgatatcttggcaagaaaatccccccttacatatcacaatgtatgcttgtaagaggggacatagtaatagccggggccaatttattttatttcatcatttttaaaagcgcttctctgccgctcatgccgactttgatgccaagatcttccgcagcgtacgtgacggattctaaaggtgcgtctaacagctggtcaatggtgcggacaccaactgcgcgtcccgccacgatgccgcgctcctttaatttttcattcagcagcgccacatcaagcgcgccgcacataatgtatccgtgatcattggcgacggccataaaattcgttttgggaagctttactgtcacagctgtaaaaggctgtccttctatcatgatcggtgtcaggtttaccacgtcaaccactcccttcattcatcactttatgatgaagggcacagcttgttgtgggctgactgccttattgtgcaagcttccaagcaagcagatcccgcaaaaattccggcataaaatattctttttctgcagcgtcgcgaatcaacggaaacagtttgccgagcgtaaacatatcaagcaccgcaacggagtattgtttatgtttttcaatatcttccccgttcagtgtgatccgagtgacgtgggtgatcccgtcatcgagccgtttcgtttctacctcaacgccggcatacaccattttccccatcacttctccgcggaagccgagtcctttgatccggagctgctccatttgttcggaagcggcatggacaatggtttccttcagttcttctcccgtcaggcggacagccaccgggttgatcggatgcggacagatgcggtgcagatccagctttgtcacaggacctgcttttagcggaccgagaatgacacctgaattgaccatactaatgtccgtctcgcaccattcctttaaggcgtatgctaaaagcaaaggcagctctgattcttcaaaccacttcacctcagcatcttgtgcaagctctgcaacggcatcggacagtttctcctcggcttcacgttctttttcattgagaaacgcttttgtttctgcggattctcctgtccattccgccatgttctgcacagaagccgttttgctaatgatgcttcgctgtacgctgtccaccgtgatttctacacagccgacataatggccgtatttctcggcgctggccagcagtaccccattaaccacttgtccatcttcaagcaaatgatgggtatgtgattcgaggattacatcaatctcaggcaccgcttcagccactgcttgatcatcaagaatgcctaaatgtgacagcagaacgataatatcagcctgccctttcacttccagaatggtttcctttatgctttcaagggcatccgtaactgtccatcccagcttgtcatatacaggataatacggcacagttacacctaagaaagcaatggacataccgtttttcaatgatttgatatggtaaggcaccgcccaggacggacggtttccatttttatcaaacaggttagagacgatgacaggaaattcagcatgatcatataagacagcaagctcttcatgcggaagcgtaatcccttcgttattgccgatcgccgctccatcaatgtgaaggcggtttaagagatcgacattcgcttttccgaatgtcgcctctgtcacgaattgaaaacgatcaagatgatcgccaatatcaaaaacgagcgtctcttcgccgtctgactgatgctcttttcttttctgctcgatataatctacaattttcggccagttttcaaaatggctgtgcaaatcatttgtatgatataagcggagcttctccttcataatatctctccctaatcgttcagctgaaaatgccttcataaatgagctggcagccgatcaaaatcaatacgatccgcatgatcataacgatcgttttcgtctgcatttttctgttgatggcggcgccaagctttccgccgaaccaagcgccgggcacaagcgcgagggcgtacagccaattgacgtgcccggaaatcatatgtgaaacagaccctgtcatagaagacaggaaaataataaacatggacgttgccaccgcaaccttcggcggaaacagaaataacagcatcatcgccggaaccatcagtgatccgccgcctataccgaaaagtccgcctaaaaaaccgacaacaaaggcaatggcaataccgacagaggcctgatatgagtacgtataaggctcaccggcatcatcctgaaatgtccggataattcctttgtgcgctttgttgattggccgggctttcgctttcagcattaaggataatgaaatcagaatcataaaaatgccaaaccaaacggaaaacgagtttgaattgaacagctttgacacgtaagccccgatcatgctgccgggacccgaaccgataaagaaaatgagcccgctcttataatcaactgttttatatttaatataagccaaagttgaagaaaggcccgtaaaaataatgaccaaaagcgaagttccaatcgcaacctgcggcgtcacatcctgaaacagctgcgtcactgtgcttaaaaacatcagagatggcacaatgacaattccgccgccaagcccgatcagacttcctaccgtacctgcgattaatcccaggacgaccaaaatcacaaacgacatcaatcaaaacctcttttctaaaataaatcgagctgtctcggagcaagtccgctgtactcgatatcaagcagttcaagcatctgcttgccattatccgcagcgtcaccgccggaattgttgttgaacaggacaaaaacatccttacattgctgctgcaatttattcaggtgctttttccaatcctccagctcctgttggttgtagcggtataagtacctgacctcccgccagtttttcccgccatcaggcttcatccagccctgcttgttgcgtccgtgaaacctgacgagcgttttgttttcatcggtcgcgcgcaacacggtcggaacgctgccttctccgatttgcggttcatcacagacactgtgaatccagccttccgctttcataaatgaaagcgtctgctcataaaatggcggcgagaaccaggaacggtttctgaattcaagcgcgcaaggaatatctcccatttggtgcttgcaccatctcaaataggcgacattctccttcttgcagtcaaaccacggcggaaattgaaacagcaccatggcgagcttattgctatgtaaatatggcgttaaagacaccttaaacgcatcaaacatctcctcttttgagtcaaagggaatttcgccgcgctgatgccctgtcatgccctgatatgctttcacgataaattggaaggtttcgggcgtttccttcacccacttttcattattgcgcgccggctgaatcgcgtaaaagctcgcgtctaattccacgatcggaaaatgggaggaataggcctgcaattttttctggctggccgttttcggcggatagatgctgtcatgatccccccaccccgtcagtccgatataaatcacactcattcacctctcttccagtttatcacacgtgttttcaggtttcctcggaaatgctgttcatatggcgggaaaatgcagaacgaagatgctgatattgttcctcattcgtatctaaaaacgcctcttctcttgaggaaggaatatgctgatattcaataggcgcctgaaactgctcactcgtaaaatcgtacatcacaccattgatgctgttgtaaaaatgccagctctcaccgacttttgttttgaaaatcgtgccgccgaaatggtcttgaatcaccaatgccgtcacgccgcattggccgcatgacgggcattcttccgtccatttagagctcgaatggcgcgaccaggattgcttaagtatgtatttgacatgctccattgcctccgcctcctttaaaaaaagataccacgttgatgagattttaaaaactagaacggaggaaatcaaaaaacccggcggtaaaatccgccgggcttacgaaggaacgaccagagctccgtcaatttcagtgaccttttccccatcattgtacacgcatcggcctttgctgtaagtggcccaaatgctgcagggaaatgtatgtccttcgtaaatgctttttttatgctttgcaaacatcgattctcttgtaacagtgtacggctccatgctgacgagcacgaaatctgcatcacaccccgcctcaagccgcccttttttctgaaggccgaatcgttttgcaggggccgccgctgtccattctgcgatggtttcaaacggaatctgatgctcaagcgccagttccagcattcctaataaagtgaactgcccgccgctgattccgccccatgataaaaacatgttatcctcccgcttcaaggatggacggcagggggaatggtctgaggaaaccatgtcaatgtccccggcaatgagcgtctcgatcagcgtctcttttgattgcagcgaccggagcggaggcgcgcattttgcgacagagcccctttgccgtaaatcgtcatggctgaacaagacataatgcgggcatgtttcaaccgaaacatcaagaccttcctgtttcgcctctctgatcagccggaccgctttcgccgtgctgatatggacaaaatgaaccggacaacctgtcaccttcgcatactgaatcgtgcgatacaccgcttcaacttctgcttcctccgggcgggaggcggcgtacgcatccgcgtccacctttcctttattggccaaaaccatctgcaagtagcttgtaatcgcgtcactttccgcgtggagagcgaggatttttcctgcagccgcgatttctgccatgcctttgagcaatgtccgttcatcaacagagcggaactcatcagtgcctgactttgataaaaacgctttaaacccgatcgctcccgcttcagccatcggacggatgtcctcgatatggcctggcacaaggccgccccatagcgcaaaatccacggcagatttttgcctgcctagctcagcttttgcgagaagatgctctgccgtcacggttgatggaatacagttgagcggcatatcaaaataggtggtgcaaccgcctgcggccatcatttgagaacctgtttcaaacccctcccaatcctccctgcccggttcattaaaatgaacatggcaatctatcacaccaggaaacacgtatttcccgtctgcctggatgatttccgtcccgcttgcttcaatgtcagaacctatctcggcaatgacaccgttttgaactgcaatatcagcttctataacgccatctggcgtaactgccttcgcaccttttatcaccatatcgtaagccatattgatccccccatgtaaggatgacgatttttcatgtcagtttatgtaacacaaccagttctattttcaacagtttactgctactatgatcgtattacatcagcaaaaccgctagaattcctattgaaaattattcaccttaaccaatgtttttatagaaaaggagaatgcgctatgaatatttttgatgtgatgaaaataccggcttttaaaaacgccaatttaatcgctggaaaagcaggaggggaaagagaggttcagcatgtcaatatgatggacgctccggatatcgcagactttttgcataagaatgaattgctcgtcaccaccgcctatcacctgaaggatcacccgcatcaattatctgaactgattcggcaaatggcaaaacgcggctgcgcgggcctcggcattaaaacaaagcgctatctggaagatatcccgaaggaaatcatcgaactggccgattcatatgcgtttccgatcattgagcttccggaacacatccgactcggcgatattgtgaatgccacactcagccatattctcgatatgcgttctaacgagctgcagcaagctatttacgcgcacaaaaaattcacaaaccacattatgagcggcaaggggctgcaatccctcctcaaaaaggtgtcagacctccttcagcttcccgtgctgctgcttgaccagcatgccaaaatgctgtctgcgtctcatcagatttcagttgagaccgaaaagctgaaaggcaccctgaataccgtatccgggccatttttcacttgtttctctacaatctcagatcagaaaacatattctgtcctgcctatttataatcacgaaaaaaactgcggctacctgctgataccggacatggtgcaggcaggcgacaaaggattgatcctcacgattgaacaagcggccaacgtcatttcctttgaactgctgaaggaaaatgcgctgaagcagttcagccggcgggcccgcaatgagtttttcaacaattttattgagcggaccttttcttcagatgacgaaatcaaaaaccgggcgaaagaattcaagctgcgctgggatcaaaaatacatgtgcatcgccggcaaactcgatcgcaatgacgaatcaatcagctttacagaaaatcagctcgcttccgacagcgtattcgaatttcttgaaggtgaattatcagccttcccgtttccgcctcacttctttatgaaaggaaacgtcggcattattctaatcgaagcgacagacagctggagtgaaatgcacgcctcggtgatcagctttttagaacagttccaaacacaggtcagcgctcaatttaaacgaaccgtgtcctttggcatcagcaatatctgccaaaagctcattgatgttcccgacgctttcacagaagcttctgatgctctgcaatcggggcatttgtcgagaagcaccgcatttatccaggtgtatcacgccaaagatgtgcctgagcttctgcgcttgctcccggttgaggatttgaagaaattttacaactccacgcttcagagcctcgctgaaaaacagcaggaggatcaaagcctgcttcatacgctttccgtctatttagagacacactgccaaatttcagagacggcaaagcgtctgtacgttcatcgcaatacggtcatataccgccttgaaaaatgcgaagagcttctgggtaaaagcttaaaagatcctgaaacaacgatgcgtttgcggcttgccttacgtatgcagcggctgatcagctaatgctcgttacattttcttacaaaacgaatcatttttcgtcactttcagcaatcacacctgtctttttcagctactgtatccaatgacacccctcgatcggcacgatatcatgttactaaagttcacatacagggagggactatagtgaaaaaaagatcgtttaaggtgtttacacttagcctgcagcatgtgctcgccatgtatgcaggtgcgattttggtgcccctgcttgtcggcagggcgctgaatgtaacaactgaacagctgtcctacctattggcgattgacctgttaacatgcggcgtcgctacgcttttgcaaaccttgcgcggaacatacatcggcatcgggcttcccgtcatgcttggcagttcatttgtggccgtcaccccaatgattgcaatcggcagcaattacggcattcacgcgatttatggttccatcattgcggccggtgtgttcatctttttgtttgcgcgttttttcggcaagctgactgtgttatttcctcctgtcgtaacaggtaccgttgtgaccttgatcggcctttcacttgttccgacaggtgtgaaaaatatggctggcggcgaaaaaataaacggcagcgccaaccccgaatacggttcgctcgaaaaccttcttctctctgtcagtgtccttgttctgatcttagtcctcaaccgctttctcaaaggatttgcccgaacactgtccgttctgatcggcatcgccgccggaacagcggcagcagcgatcatgggcaaagtcagcttttcttctgttacagaagcaccgttcttccaaatcccgaagcctttttacttcggagcccctgcgtttgaaatcggtccgatcttaacgatgctgatcgtcggaatcgtcattattgtggaatcaaccggcgttttttacgcaatcggaaagatatgcggcagacctttaactgaaaaagatctcgtcaaaggctatcgagcggaaggaatcgccattctcatcggcgggctgttcaatgcctttccttataatacctttgcgcaaaacgccggcttattgcagctgaccaaagtgaaaacaagaaacatcgtcgttaccgcaggctgtatccttgtctgtctcggactgattccgaagattgccgcccttgcatctgccgttcctgctgctgtacttggcggcgcgaccgtcgtcatgttcggcatggtgattgcctccggcgtcaaaatgctcagcacagcggatctcaaaaatcaataccacctcctgaccatcgcatgctcaatcgcactcggcatcggcgccagcacggcccccgggatttttgctgaattccccgctccgattagaattctggtcagtgacggcaccatcactggcagcctgaccgccatctttttgaatctatttttcagcttgcgcgacaaaaaagaattaacagcacagcaaacagaacttccagtattagaacatacactcgcattagaaaaagaggtgtaaaaaagatgaaggaacagcacaatgccttacagctaatgatgctggggcttcagcacatgcttgccatgtatgcgggagccattctcgttccgttgatcgtcggagcagcgatcgggctgaatgcggggcagctgacgtatttaatcgcgattgatttgtttatgtgcggggcggcaactcttttgcagctctggagaaaccgatatttcggcatcggccttcccgttgtgctcggatgcacgtttaccgcagtcggcccgatgatttccatcggaagcacttacggtgtcccatcgatatatggtgccattatcgccgcaggactgattgtcgtcttagccgcgggcttcttcgggaagcttgtccgtttttttccgcctgtcgtaaccggatcagtcgtcatgatcatcggcatcagcctgattccaacggcaatgaataacctggccggaggtgaaggaagcaaagaattcggctcactcgacaacgtgctactcgggtttggcgtcacagcttttatcttattgctgttttatttctttaaaggctttatccgctccatagcgattttactcggtcttatcgcaggaacagcggctgcatatttcatgggaaaggtcgatttttctgaggttttggaggcgtcttggcttcatgttccgtctctgttttatttcggaccgccaacctttgagctgccggctgttgtcacgatgcttctcgttgcgattgtcagcctcgttgaatcgacaggcgtttattttgcgcttgcggatatcacaaaccgcagactgtcggagaaggatctggaaaagggctaccgggcagaaggccttgcgattttgctgggcggcttatttaacgcgtttccctatacagctttctcgcagaatgtcggcatcgttcagctctcaaagatgaaaagtgtcaacgtcatcgccatcacaggaatcatactggtcgcgatcgggctggttccaaaagcagcggccctgacaacagtgatccccaccccagttctcggcggcgcaatgatcgtcatgttcggcatggtcatttcttacgggatcaaaatgctatccagcgttgaccttgattcgcaaggcaacttgctgattatcgcctcttccgtcagcttggggcttggcgctacaacagttcccgcgttgttttcatctcttccgggcgcggcctctgtcttggcaggaagcggaattgtgatcggcagtttgacggccattgcactgcacgctttttttcaaaccaaacagccgaatggcacagacataaaaacgtaaaggaagatgccaatgttcacaatggatgacctgaaccaaatggatacacaaacactgacagacacacttggctctatttttgaacactcttcatggattgcggagagatccgcagcactacggccgttttcgtccctttctgatcttcaccgcaaaatgactggcattgtaaaagctgcggatcgcgagacacagcttgatttaatcaaaaagcatccccggctcggaacaaagaaaacaatgagcgatgactcggtacgagagcagcagaacgcagggctcggcaaattagaacagcaggaatacgaggagtttctcatgctgaatgaacactattatgatcgcttcggctttccttttattttagcggtgaagggaaagacgaaacaggacattcaccaagccctgctggcaaggcttgagagcgaacgagaaacggagttccagcaggcccttatagaaatttaccgaatcgcccgctttcgtctggctgacatcatcactgaaaaaggagagacgcaaatgaaaagaaccatgtcttatggcaaaggaaatgtatttgcataccgaacgtttttaaaaccgctcactggagtgaagcaaatcccagaatcatcttttgccgggagaagcaattccgttgtcggcgttgatgtgacatgcgaaattggcggagaagccttcctgccatcatttacagacggagacaatactctcgtcgtggcaacggattcaatgaaaaactttatccagcgccatctcgcatcctatgaaggaacgacaaccgaggggttcctacactatgtagctcaccgatttttagatacctattctcatatggacaagatcactctgactggtgaagacattccgtttgaagcaatgcctgcatatgaggagaaagagctcagcacaagccacctcgtcttcagaagatcgcgtaatgaacgaagccgctctgtgctgaaagcagaacgaagcgggaataccataacgattacagagcaatacagcgaaatcatggatcttcagctcgtcaaggtgagcggcaactccttcgtcggcttcatccgggacgaatatacgactctcccggaagacggcaaccgcccgctgtttgtctatttaaacatcagctggcaatatgaaaatacaaatgactcatacgcttctgatccagcacgctacgttgcggctgaacaagtccgcgacttggcgagcaccgtttttcacgagctcgaaaccccttcaatccaaaacctaatctatcatatcggctgcagaatattagcgaggttcccgcagctcactgatgtcagcttccaatctcaaaatcacacgtgggatacggttgtcgaagaaatcccgggctcaaaaggaaaagtctacaccgaaccgcgcccgccatacggtttccaacattttaccgtgacaagagaagacgccgagaaagaaaaacagaaagccgctgaaaaatgtcggagcctgaaagcctgatgggaaaactgacaacccatattttagatttaaccagcggcaaaccagcggcgaacgtaaaaattgaattgaagcggctgggcgaaagtattttgaaagaggtttacactaacaatgacggcagagtcaatgtccctctgctggctggtgaagagctggtttccggagagtatgtgatggaatttcatgcaggagactattttgcgaataaaaacgtgaatacggtcgaccagccgtttttaaccatagtcaccgtccgttttcagctagcagatccagatgcacattatcatatcccgctcttgctgtcgccgtttggttatcaggtgtatagggggagttaagaaggaagcccgcctcaccggcgggcttctatttgcacttcaataaacttttgatcctaggacagtacttgaagtgatccccacacttagtgaaacaacagctagaataaacattcacctatatttttcaggataattgcctacgagaaaaatatcctgtagtcctttcatttataaatcgaggtttcaaactaataagtcagctcttagcagccgagctcccttctccaatcctataaacagaccgcgttttttctcgaaaaaatactctgaagacaattgctgcgtttttaatagttttgataacgcgttctctcttacacctttagacaaaatattcattttttcttttttagacttaaatctatgtcgaaaatgatcgttggcatatcttatactatctccactaaaggaggtgacattatgggattctacaattctggtggatacagtggaaactctggttactcaaacggtttcgggagctccttcgctttgatcgtggtgctattcattttgttgatcattgttggagcagctatctttaattattaagtttaactttccttgcctccgccgtatccaacacctccctgtccgacagacgccataagaagtttttatggcgtctttgctatgtgttcactaatctttttctaatcagctttcaagttctacgagatttatcgtgtgttttcccacaacgcttctgcgtcttgatcgcgctgtctgactgaggctaaaaaagtccggcttttaaaagccggactcccgtctacccccgttcaactctcttctaatcctgcaagctgaccgcataatcccgccgtacccggtacaccggcacaaattccccgccagcccttcttctatatcttcgtcagaaggttgaggggtttcccgaaacagtgctttaagcgcaattatcattcctggggtacagtagccgcattggaagcctccttcttccagaaaagcggtttggcagatatccagttcctcttgttgtacgccctcgattgttgtaatggaatggccgtccacttgataagccatggtcatacacgcattggccagctttccgtcgattaaaatagagcaggctccgcagcggccgattccgcaggacacctttgtcccggtcagctgaaattcctttctaagcaggtcactcagatgtgtcgtaggaacggcagcaacctcccactcctgcccattcacggtcatccggaactgttccttttttacaggaaatggcccggcctcttttacgtccattgcttcagcccctttctgtctatcgcttcaagcagctcttctcttgaaatcggcagcttgtttatccagcatccgaccgcatcatgtactgcctttacaatcgccggagtgatggcgattgttccgatttcgccaacaccgcgcggtccatatacgtctcccttcattaagtcttctattgcaatcaccttcatgtcaggaacatctttgattccgggaatcaaatagtgatcgagattttccgcagcataacggccatccgtcattttcgcttcctccatcagtgtgtagccgagtgccatggcagcgccgccttcaatttgacctcgatatccctgcggactgatgaccggacctgccgcaatagcgtgctcacaatctatcaatttgacatcgcctgttaacagatctacctccacctcaacggcagccgctccaaatgagtagaggaaatggccgcccaccacaggatcaggcgttgttggaaagtcaaatgccgtttcctctgccaaagggcctttttcagccagctccttatacgtcaccacgagcgcctttgtgtttttgtcacgcaagcctgcagcgccgggaataagattttccgctgaacagccgctccattctgccgcccgttttttcaactgagctagaaacggcttcttcaaacgctggatcgcgtgccacaccatgcttgtgccgcgggatgctgtggaggagcctgacttcggcacttttgcggtatccccaataacaatggaaatatcctctgcggcacaacctaactcctccatgacaatctgttcaatcgctgctagaatcccctgtccgcattcttcaaatccaaacgaagcagtgattttgccttcactcgaaagagacaaacggcctcctgccgcatccattcggccataccccagcccgccgccgtgcattgtaattgccgctcccgtgcctctttgcagatacccgcagttccggctgcttcttgtaagaatgggagatttagatatggcattcaacacctgtgccgctccgtcagtcggtgcaatccgatgctcaagaggccccaagtcatgcggttttctgatattttttcttctcagctccagcgggtcgatgccgagcatgccgctgagacgatcgagatgggtttcgagtgcaaatgtgatttggttgccgccaaagccccgaaattcccccgccaccccgttgttcgtaaatactgatattccttcagtccggatattcggaatacggtacggccccgcggcatgctcgacagaaaaatctagaacggcaggcccaagcgtggcgtaagcgcctgtgtccgccacaattttcacgtcgtgcgccaatagatttcccgaatgatctgcacccgtttttatcgtaatcttcatcggatggcgcttaatgccagaacgtacagattcctttcgtgtctgatggattttgacagggcgtccgcttttcagggccaaaagcgcagcatacggctgaatattcagctcatccttccctccgaacgagccgcccatcggacttgacacaattctgatcttctcttcaggaatatcaaaaatacgggcaagctggaaacggtctttatagccgtgctgggttcctgcatacatcgtaaaacccccgtcgtcttccggaacggctacgcctccctccgtttccatatacgtatgcatctgccgcggcagctcataggtttcttcaaggactgtgtcagatgcttgaaacccttcttccacatcgccgtttgaaaaaaatgcgcggtggaggatattcccgtcctcatgcagtctttgcgcattcggccgaagcgctttttctggtgaatccatgacttccagctctttatactcaactcgaatcagctccagcgccgcttccgcgatttcttctgtttccgcagcaactgcggcgatcgcatccccgacataccgcaccctgtcctcacataaaaccggctgatcagggatgacaatgccaaatcggtttaagccgggaacgtctttatgtgtgacgacggcctgcacgccttccattttctcagcttttatggtgcaaaccgacacaatctctgcatgaggataagcacttctcagcaccttgccatacagcattcccggaaagctgagatcggtcatatatttcaattcccctgtgaccttatcccttccatccggcctgactcttgacggtttgttgatgatcatttattcccctccctcagccatcagctctgccatgatgacgttggcagcggctttttttctgtatgccgctgacataaaagcatctgaggaaaacggcagctcatggataagtgttttgtacagctcatgcgagtcccaccctggtgccatccatttcgcttcgctgtccaataatctcctaggagtgatatcggcatggccagcggcgaggcgaatgccgccgtctttcaaaaaacgtccagctgcaacagcaaccgctcctgtaaaagcctgacgccttccaagcttgtgataaaatacacgctctccctccgcccgcgggatgatgacacgcgtgacgatagccgttctaaagtcttcctcaatgagccaagcgccaagcggcagcctgattagcttcttttgatatacgataagatcagcatcaagcacaagcagaagcggaatgaaatcaccgattttactcgctatgttgccgccaatcgtggcacggctgcggattcccggtgcggcgacagcggaagcagcgtcactgaaacagccaagcgtgctcttgatcaaagggttctttctgcattcactcagtgatgtgagcgccccgatcgacacgtgggtgtcactggcgctgatccctcgcatctcgtcaatcccttcaaggctgacaaggtgctgtttcggtagagttcctttgtcccactgaagctgaagcagcgtgcttcccgatgcggcacacacatccggagcaagcttctctaaaagcgaataggcctcatcaagcgctgccggcctccataattgaatattcatccttgcttttgtcacttggccgttcaagccatcgccctccttaccatgtcatattcctcgggtgtatcaatatcgtccaactcgccgctatcctttgcctccaaaaccgctcctgctccaagctgtccgcttttcaggagcctgcgagccccttcatctcccgttaacccctttacataaggaaaacaagccgacgagaagtagattggcggggtgaacgcccctaaaaacgatgacacggcaaatggctcaggggccagtgccacaagggcattgagatgatcgacggaaagctgaggctggtcggctaacaaaatgacaacgccgtccgcccccatgctttctgcttttctcaccccgctgctgactgaatgcccctgacccttttctgcgtcttggcaaacgtgcaggctccagcgtttttgaaaaggcggagcgtgatacggcgctcctatccactcaagggaggcatgttctgtccgctcgacgaccagcacgtgatcaaggcgggacgacagagcagttttcaaggaaagtgagccgatgttttctccttttagcggcaaagccagcttgttttgacccattcttctgcttttgccggcagcgagaaacacgccgatcagataggggcttctcatacaaccgctattcgttttcttgtttgaatgatttctgcaactacacttaccgcaatttcctctggaccttccgcaccgattttcagcccgaccggactgtaaaagtgagacggaggatgttttccgttcagcagccgtttcgtgcggtttgccgaacccaacagtccaatataatggaggttttgagaaaataagaagttgatgatcgtttgatcgtgctgataatgatgggttgccacaacagctgcatcatgcggaaaaaattgaaatttgctaagcattcgttccggaaaagcggtgatcagctgatccgcttttggaaaaagagaggatgtacaataagcgggccgccaatccgtcacgataacagaaaaccctgtgtcagccgccaaattggccagcggtacagtatccggtcccgccccaaacagaatgaggcgcggcttcggttcaattcgctgaataaacatgttagtgggtggatcgaaatgcggtaaatgaagcgttgaaacagtacgttgaatatcttgcagaggcgcgtccggccagttgccaaaatgcccgttctccgtcagaaataaataatgggaggattcaatctttataacagaagtgacagctttgcctgaatgaaggcaatccctcactttctcatagtgccgccttttttcctgagtgattcgctctgcatgaacatgaataatgccattgcacccggctcccatgccccaagaaagatcgtcctccgaccgcatgtcgtagggaatcagcgttgatgtgagctgatcgcccagcgcactgattctttggaatacatcttcttccacacacccgccgctcagcaagccaatccgtctgccttttttcttaaagagcatagaggcgcctgcttttcgatacgcggagccttcaacttgaacaattgtcgccagtacagcctcctcctggtcttccaggagcgcatctaacatcgtgtgaaaattccccaatgccgcatcctcctctcgaaaattgccgtgagaaacaactagttcagcgtgattttataggtaacttgtataaagaatagacgatggaagaaaaaatgactcatgatttgtcagaaaatgaaacacatagaaagaggatttgtaaaaagagtcaaacgaagaaaatcagattggagaaaacacgaaatcatatctaaaaagcttgcggagttccgcaagcttttctttacaccgctgcctggcggccagcgttttcatacacatccagcgctgcttggagcgcttttcctgcttcgattcctgcgttatgtctgagaagcacagcctctaacccggcaagcacgaatagcacgttttcttttctgcagctgtaccccatcgtgccgattctccagatcttccctgcgagcgggccgaatgagctggcgatttcaataccgaattgtgccagcagcatgccacggacagactcgccgtcaatgccgccgggaatttcgacacaggtgacaacaggcattttgcagctgtcatctccaaacaatcttagccccattgcctttatccctgctgctaatgcggcttcatggtgccgatgccgctcaaaacgcgcctcaaggccttcttcaagcaccagtctgactccctcacgtaaggcgtacagcatcgtcgtcgcttctgtatgatgattgagccgtctttcgctccaataatcctcaagctggctcaaatcaaagtagttgcttgtgattggccgatttcccgaaagcgcttccctgtcagcttgtgacgcaatcccccgctccacctttttacgagctgcaatcacgtccgccacccgctcattatatgtaatcggcgccattcctgagggcacagacaaacacttttgcgttccgccgatggcagcatcaatcttccattcatcgactttaacctcgcagcccccaatcgttgcgactgcatcgacgataaacaatgcatcctcggtgcggcaggcttcgccgatggctttcagcgggtgaatccgtcctgtcgatgtttctccatgcaccatggccacaattttcggcttcactttttttatctcccgtatgatgtcctccgggtcaaaaaccgttccccattcgcactcaagcatatgaacatttgccccatatcgctcggcgatttcagtcagcaaataaccgaaacggccgtaaatgggaatgagcacatcatcttccggctctatgacactagccagcactgcttcaattcccgcccgtgaagtgccgtcaatcgggtatgcccagcggttttttgtttggaacagctcccgaagcatctccatcgtttcattcataatacctgtaaacgccggatcaaattggccgacaaccggggtgctcattactcttaatacacgcggatcaacctcaacaggccccggcgtcataatcgttcttaacggggtgcataattctcttctgcctgacacagccattcctcctttatcagtaagccagtttgtataataaatcagtcagtgcgcggacgccgatctcaagctgtctggctgacgtatattccttcggtgagtggctgacgccgcctcggctcggcacaaacagcatacaagcaggatagcgccttccgatcatttgcgcgtcatgccctgctccgctcaccatttcctcacagctgaagtcgttttctaatgctgtttcaaaagccgcagccttcagcctttcgtccatcggcacaggctctatccgcatatattcatcaatcacagcgcgaattcctttttgtaggcaaatgccgttgatcaaagcaatcatgtcttgatgaaactgttccagcacatgctgatgctgatggcgaatatcgattgaaaactggacgcggcccggtatgacattggctacattgggctctgccgttatttttccgcatgtcagacggagctcatccggcagctcctccgaccgcagtaacagctcatgaatgatacggctgctggctgcgagcgggtccttgcgccatttcatggaggtggttcccgcatgattgcattcaccctccagcgtgacgagatagcgcctctgccccgcaatgcttttcacaatcccgagatcccgtcctgacatttccaatgtctgtccctgttcaatatggagctcaacaaaagcgctgatatctgtccgatatgctgcctgaaacacacctttgccaaaaccgttctcatgcatcgcatgttgcagcgagactcctgattcgtctcttggctctgctccatcctgtaatgaaaaaacacccgtcatattccctgatccccaataggtcattggaaaacggctgccctcctcctcacataaggataccgcttcgagtgtttttttcggcgctccatatgtctctttgagccgctttatcgcaagcattgctgccagaacaccataggcgccgtcgtattttcccccattgatgacagtatcgatatgtgaaccggttataatgacttcatccggagactgggtgcccgaaagccttccaaacaaattgccgacatcgtcgaatcttgtgtcaagcccgaaagaagacatttccgttttcacagcaagctgtgcgtccatccactcttttgtgtataaaagcctcgttacgccgccatccgcagacgcaccgtattgggcgagccattcaatataatctgtgatgctgttttttactgaaagcttctgcttttccatgtactcccccctctggccgctatggtgacttcattatagaaggaggaacatgatagttcattgacagattaaccaaaaaaacgtttattttttagtcacagtatctatccagcaaccagattcaccctacatgtcacaactattttgatgtaaaggtcaaaaggaaacacggtaaggaagagagccagcaagagcgaaagagagggtcaagctcagcttgccagagaggcgatgtttgcggaacggatgaaaacggaaatgccggcagctcgcaaaaacaggacctaaagatatgggaacaggagatttccgcctcctccaaagggactaatttacaattttaatgaaaaatatacaaaatgacacttctatcctttatttcaattttagataatagacatgatctgataaaaggagggcaagtgatgacaaaaaaatcatggtttctgccgctcgtctgtgtattactgatttccggatggcttgcgccggcagcttcagcaagcgcgcaaaccgaattaagcctcaatgaccgattggcgtcttcccctgcaggaacaggaagccttctctcattagccgcccccgctgcaccctatgctgacacagatacctattatgaaggggctgaaggtaaaacaggagactcgctaaaaagcaccctgcaccgtattattagcggacacacgatgctatcctacagcgaagtgtggaacgcgctgaaagaaacggatgaagatccgagaaatccgaataacgtcatcctgctctatacgaatgaatcgcggtccaaaaacctgaacggcggcaatgtcggcgattggaaccgcgagcatgtctgggcgaaatcccatggcgattttggtacgagcaagggacctggtactgatattcatcatttgcgcccggctgatgttcaagttaacagcgcaagaggaaatatggattttgacaatggcggcactgaatatgcgaaggcacccggaaattattatgacggcgattcatgggagccccgcgatgatgtgaaaggcgatgttgcccgcatgctgttttacatggctgtccgttacgagggtgatgacggctatcctgatcttgagcttaatgataagacaggcaacggctcagctccttatcatggcaaacaatctgtcctgctcgaatggaataagcaggatccggttgacgaccgcgagcggaaaagaaatgaaatcatttatgaaaaatatcagcacaaccgcaatccatttatcgaccaccctgaatgggcggatgagatttggccgtaagaaaaaggtgctccttttgaggagcacctttttctaatacacagcctcttccgtttccgcatcgaaaaagacgacgtggtccattttcactgagagctggattgaatcgcctgcatcgattcgcgtgtttccgtccaggcggaccttgagccgctcgtccccagccatgacatgtactatgagctccgagcccagattttcattcacttccacgttcgcttgaaacactgaatcaaacaactggtcatttcctgtcatttgtgtgatgtgctccggccgtacaccggcaatcatctgttctccggcatatcccttttccttcagccgctttgctttttcttcaggaatatgaagccggatcgaagaatttgtgaaaaacagctcgccatgctgctgttctatgatgcctttcaaaaagttcattccgggagagccaatgaagcctgcgacaaacaaattggccgggtaatgataaatgtcatgaggtttcgccacttgctgaatttccccttcattcatgacgacaatccgatctcccattgtcattgcttcggtctggtcatgcgtgacataaatgatcgttgcctctaatcgctggtgcagcttgctgatttctgtccgcatcgtcactcttagttttgcatccagattagaaagcggctcgtccattaaaaagaccttcggctccctcacaatcgacctgccaagcgccaccctttgccgctgcccgccggagagcgccttcggttttctcttcagcaaatgttcaatttctaaaattctggctgccgcatgaacccgctcggcaatttcctgtttcgccatctttctgagctttaatccaaacgccatattatcaaaaaccgtcatatgcggataaagcgcatagttttggaataccatcgcaatatcacgttctttcggcggaagatcattgacccgctccccatcaataagaagatttccttcagaaatgctttctaatccagccaccatccgcagcgttgttgattttccgcatcctgacggccccaccagcaccaaaagctccttatcctttacatctaaatcaaagtccttcacggttaattgtgagtgatatgattttttgacgtgttcaaatgttaatgaagccatcagaaaagtccccctatcttttgacccgttatttcgtcactggaaacaacttggtctttctgttatttttagagtaatcgattcccatttttgctatatttctaaaataaaaaatgtaaatttgtattataacgtcataatacattataatataaataataggttaaaaggaggctaccctttgttaaacaacggaagttctacacctttatacattcagctaaaacaaatcatcactgatgacatcaaaaagggcgtgtattccccaactgccaagctgcctaccgaaaacgagctttgcaccaagtataacgtcagccgcatcaccgtcaggaaagccattctcgatttagtcgaagaaggctatctgatcaggcagcagggaaagggaacgttcgttaaaagccctaaattaaaacgagagctgatcgctgtaaacggctactcggaatttatggaatcaaccggcaaaaaaccgaagcatcatgtgctgtcccatgacatcattccagcgtcaaaacccatcgccgaaaagcttcaaatccaacccgagagccctgtggttgaattaaaacggattttatataatgatgatcagcctctcacctttgaagtgacgcattatccgcttgatttgtttcccggcattgatacctttattgctgacggcgtatccatgcatgatattttgaaacagcaatacaaagttgtacccacgcacaatacgaagctattaaacgttgtatatgcccaacaggaggaaagcaaatacctggattgtgatatcggggatgcgctgtttgaaattgataaaacggcttttacatcaaacgaccagccaatctattgctcattgtttttgatgcacacaaaccgtgtcacttttaccatcaacagcccctacacataacaggcataaaaaacgagacactgcttatagtattctcgttttttcactgcttcccccgtcctccaagcgataaggatagccatagccgaaagctccgtacacaccgcatgttttcgcagccgtttcggcggcctggcgcaaagcgtacgttatatcctgcttcacgcaaaaggcagtcaaaaagcctgctataaaagaatctcccgctccaagtgtatctattatatcagcttccacaatcggctgatgatagactcgatcacccgcagacaggattgctccttggccccctcgggtcatacaaaccattttggctccgtacccatgagctgttttggcaagctcaccgcattccgactcactcaaatcgcttcctgaaaaaaacgcatacgtcacataaggacagaccctcctcaaataatcatcctcccgattggttgaaaaatcaaatgagacagggaccagcccgcacagctgcggaagatcgttctcaagcctgctgtacacgctcgtatgcagcagatcatgcccgctgataaaagatacatctttctcctgaaacgcgaggcgaagccgggactgaatgccgcctttatttgatctgacaaaaatgcggtccccctgttcatcaagggtgacaatcgccatcccgttttctccgtgcgcctggcggatataatctgcattgacctgctccagcttgagaacgttcaacagatgcgccgcggcttcgtcattgccgacgattccaatataggaagactcatgcccgagccgcttggcaagcacagcaacgtttaaggcatttcctcccgggtaaaatgtttcttgatcctggtagtaatctacaacattatctccaaccgcaatcaatttcatagcgcttcctcctttatccttttacactgccgcttgcaatcccgcggacaaaatatttctgcatcaataaaaatagaataataatcggcgcggctgaaatcgttaaccccgccagcaggacgccccagtctgtctgcagcgcgtctctgaactgcatcagcccggctggaatggtccgtaaattctcatcatctatgaaaataatcgcaaacataaactcattccatgtatggtaagccgtcaaaatgccggatgtcaccaaaatcggcacgctcattggtaagaaaattctgaaaaatactccaaaacttgtacacccatccaaataggccgcctcctccaattcttttgaaatagaaagaaaataagagcggatcaaaatgatggtgaatgggatccgataagccgcatacggcaggattaacgcccaatacgtattgtacaggccaagcgactgaataatagaataaagcggcacaagactgacctgcggcgtcagcatcaatccgccgagacatagcaccaagaagaatccttttcctttaaactcaaaccgggaaaggccatacgctgcccatgcactgataaagacagtgatcacacacgtcagcgccgtaacgatgacactgttcataaaataagaagaaatcccctggttccaggcggaaacaaaattttccggatgccacgatgacggcagcgaccagctgtgctcaaaaatatcgtcagagtttttaaaggcgctcatcaccatccagagaagcggataggcaatcgcaatcagataaagaaacagaaaaacccacacagacgtttctccgatataccattttcgtctaggcttatctttaacctcaatgtgctggtcaggcacaggctccaacctgaacgaatctgtcttcttctgaggcagcatcagttactcctcctttccggttttaaagaacttcatttgcatgagcgataatgcaagcgtaatgattaacacgacagtggcaatcgctgaggcgtagcccatcatatcctttgtaaaggcgcttttatataaaaacgtgctcaagacttctgacgcgtttcccggcccgccgcctgtcaaaatgtacggctcattaaagaccgtaaaggccccggtcagcgtcatgaccaccgcaacaaaagacatctctttcgtctggggaacagtaatatgaaaaaactgctgaattttacccgcgccgtcaagccgggccgcttcatacagttcatccggtattttttgaatcgacacaatgtacagcatcgcaatataaccgacagattgccactgggacacaaaaatgacagaaagcatagctgtgctgtcatccccgagccaggccctcgtcagctgatcaagaccgatggcctgaagcagctgattcaaaagccctgtctccggattgtaaataaaatcaaacaaaagcgcgatcacagtcattgagatgacaaccggcaaaaagaaaacggtacgaaaaaacggcgaccattttctgaccagcttatcctcaagcaccgccgccaaaatcaaaccgccaaatacctggcatacaattgagatcactgcataaagcacattattggtaagtgcctgatagaagacaggatcatgaaataattcaacatagttttttaagccgataaacgttttttccggagaaaatgagctccactgaaacaggctgaggaatacattctcaaaaatcgggatataaacgaaaagtaaaaaaacgagagcgggcaccaaaaacaaataggggattattttattctgattgaccaagggtatctcatctcctttataaaaagaaaaggtgcgaagcttcaccttttctttgatttattcagctgacgccctcacctgctttgctgccttttgaacggctttcatcacctgctgcggtgtcatgtcgccgccaagcatttgctggacgccagttaggtacgcatctgcgacttcaacatcgacatccatatcaaaccatggaaccattgatttggcatcaacaatatgctgaacggcttcacgctgaatggctgttgcattttcttcagtagccgtaccttgcactgcactgtatttcccgacatctttcacgagcttttcgcccattcttttcgacgtcaagaactgcaaaaattccatcgcttccttcggatgttttgttcttgaggaaatcatgaatccttccggcgctcccgttaacgcttctgaagatcctttctgcccgctaatttcaggaaatgggaacatcccgagattaaccggttcaaccagcttgatttccgctgtttccgcatatatcatcgccgactttccgctcttaaattgctgtctcacatattcgtggtcgacggagtttacatgtttattaaagtaaggcatcagctcttgaagcttttcaagtgcttttacgtagccttcatcagtaaattcacccgttttggcgttatagtccttttcccgtgttttttcatcgaccatccgctgattaagcgtgccgatatagtgcgagattgtccaagtcgcctttgttccgaagctgatcggtgtgtagccatgttctttcagcttttttgacacatcgattaattcatcccacgtcttcggggatcaagattcagcttttggaaaatgtctttattatagaagaatgatttagcgtccatttgccacggcacgccatattgcttgttttcataagtaaatggtgtaatttgcgattgaacgagctgtgatgaccaatcggtgtcatttttgtagtaggacgagagatcaagtgctttattgcctctgataaatttaaaagcaaactcatcgctccaagagaagtaaatgtcaggagggctggtggttcccagcatgaccttaattttatctttataggagtcatttaaaacggcttcaatttgtatatcgatatctgggtgttctttttcaaattccttaacaacctcttcaaaataacttttttccggctccttcggccatctgtggaaaaatttcaatgtcacctttccgtccgctgaactgctttggctcgaacagcctgcaatggtgaacatactgacagctgcaatgatcaagaacaacaacattttcttcaaagggttggcctcctctggacattagactataatgttatataacattatagtctaatgcataatggttcctcattttcagatcaatactcaactttccacatgtatcttctatgagataaaggatgatttctcgcctctgccagctcgtctgcatagcttctcagcacacgattgagaacgagcggagcaagatagcctttaactgaatcgtcaattgcagtgaagtcgtaagatgcagcatcaagcacagtgagctttttgccatactttttcgagaaggtaagcgctcgctcttcaagaggtcttgtttcatctaaaccgagcaggatgataaacggcacggattcatcaataatttcaaacggtccgtgaaaatattctccggcatgaatggcgtgggaatgaatccattgcatttccatgagaatgcagatgctgtaggagtaagcgacaccgtagtttgcaccgcttgccatggtataaataatactttctttttcatgggcttttgcaaattgcttggcgttgtcagcttcctgcttaagggctttttcatatacagcctgcaattgatctaagccttcaattgcttgttggaatttcgtattgttttctaatacttgcagggttccaaaaacgatttgatacaaaacgccatagtttgtattgatcgcaagcgcctcatcaccccaatcgtactgggcaacatattgcgcttcctgcgctaaaggagactccggtttaaacgtcatcgcaatcgtaagtgcgcccttgccccttgcaaacgcagcagctttgactgtctccggggtatttcccgaatgcgagcacaaaataacaagagacttttcaccaagctgaacagggttgcgctgaataaattcgttggcgctgtagaggtcggagtttattgattttgactctctgtcaaacacatacttactcggatacataatggcagaagaccctccgcatgcgacaaagaatacatgatcaatggttttccctttcaaatcctgcaagaaagcttgaacctcacgatttacttttgctgtggcctgactcaaatccttcactccccgtttttattatataacgttatataacattatatattgttatattaaagtccgcgggtaggattgtcaatattattttctgaaatttctcaataatttattcgaatgacagacaaagggtcaataagcgaaaaaatgcccaaatcaaaagccagaacttgacttaagctctggcttcgctgttcaatccgcagactgacgtcttatttaaaaaataccttgtctatattgtacttcgagtgctgtgtattgatgatatatgtttcataaatctctctttccattggatcatcaactacacatacctcaattttataaacttcatctctgtgatgtttgatcggtgaaacagtgtcttcgaaatgcttcttaattctctgtcttaactttctggctttaccgacaaacagcagctcgtcatgaatgttgtaaaacataaaaatgccgcctttgtcccttgggatctggtgaaagtcgatgaatccgtgaatcggttttatcttcggctcgttatcattagctgactgctgtcgttcagtgatggtgacattcggtgcgggtatatcaatttttatcaaaatcagttcacgtcctctttttcattaaagataaatgctaacacatacagaaaagaaaagctagaacagctttattatatttgtttgttatgctcttgcttattatgcaagtgctccggctggatgataaggactaaggtctaattctgtctgctttccgagaactagctttgcgagctctgcacccaagaacggtcccatcgtcagtccagaagcacccaaaccgtttgcagcatataggccttgaacattcggcacggcccctacgaccggcagaaaacccggtgtaaacggcctgaagcccactcttgtttcaactgcagcggcatcagcaagacccggtgcaacggctaacgctttgctcaatacttcgtgcaggcctccggctgtcacacgaagatcatcaaggcctgcatcgttttcgtgtgtggcgccggctacaattctgccgttatcaaacgaaagaatgtactgatcactcggcggcattacaaccggccacgatcctgtatctgtatctgtcatttcaaaatgcataatctgcgctttttgaaatgacacttgaaaatgaatgccaagagacttcaatatctcattggcccatgctcccgccgtcacaatgaccgcgtcagccgcaaactgctttgcatctgtttgcacgccgttgactgttccgttttcaaaaagcaaagacgcatttcctttgatgaccgttgcgccgcgtttctctgcagcgcttaaaagcgaccggcacagcgctcttccgttcacacgggcggcaccgctgatatgaaccgattcatagccgtcagctaaaatcggaaacagctttttcgtttcacttgcagacaagcgggtaatgtcgccgatttccggcgcatcctcccgtctcttatacgccctttcctccattttatcgagtttagacgcgtccgtatgaatgctgatggcaccgacacgtttgtatcctgtatccgtttcaccgtctttttccaattgatggattaaatccttatagtaccgggctccccccttagcaagctggtaccaatcctgattacggcgttgcgagagccatggacagacgatccccgccgccgcatcagtcgcttgtcccggctctttccgatcaatgacagtaacgcgagcgcctgattttgcgagatgataagccgtcgacgcgcccagaatccctgcgccgacgatgatgtacgatttcatatgcaaacaccttttctattataatgtctattcattttaccaaatcgaatgctttccttcgaccttttgccctaatgtggaaaaaccgcgaagttcgtccaatctctttactctcctatcgaatatcctgtcactatcaatagagaaaggatgataccatgagcgaaaatcgtcatgaaaatgaagaaaacagacgcgatgcggcagtcgcaaaagtccaaaacagcggtaatgcaaaagtcgtggtcagcgtgaatacagatcaggatcaggatcaggcacaggcgcagtcacaagacggagaagactaatgaacgaaaacatcattcctctcaacagacatactcaagagatacccactactgaatctgttatcaaaaacagcggcaactcagaggtccatatcgacattcacattgatacaatgccaattgcttttgctatattatgctctgcattagccgcaaagcagatgacaaaagaggaattcgatatggcttatactcaattgcgagagatgaacagagaaaataacagcagatcatctgtaaagcaaattatcaatcaggagacagaagaagagtaaaaaaccgcggcccctcggccagcggtttttcttctgcatacaaaaaggacgcgactgaaaaccagtcgcgtcctttttataaaaaaataatcgattgaaccttccatttcgaacttgattatttttataaaatggtacggaatgatttataaaagggtcacccaaacccttgatttaaagccatttcttcagatggtttaaatgatgataatcttaacttggcaccgtgttggcatgagctgaagccgcatgatataagggtttacagtaataattcacggttgccgccgtgagtaagtttcatatcttttgaaagttattattgaagtaatgcacctgttagttgaactattccacggcttatttaaactgtactaatcttttgaaatagaaataccgttctcaataaaatgctttattcatatttaaatttttgaggctactaggcatacatccaaaccaagttttgaccctgagcgtaaactagttaaaagtctaattgcaataaggagtgaacctcgaataatggtatatcaaagacaaatgacaccctatgccctgaatccccgggatttacaaaattgtttgtatcgtttcacgtatttgtggcttagaaataatgataatttctggtatttcttaacggctatcggagaatcaagagtttatggatataggtttttcggtggaagatggaataattattccgttgatttaagagatattgtttccttctattgttctcctccgactccaactctatattaaaacactgagcctgatatttgcatatgaagaaaatatttgtgaattaaaaaaggtcaaagcaaaatgaattgaatcttgaaatatccaggattcaaaaaaacaaagatgtaatcattttctaaaattacaataggcactatcttacacattcgaaactatcacaagcttcaggggttgaatatagaggcttacacgctttcagacacggttggacactagaacactaaaacaataagtgaaaaatattcacacataactgaaaaaatcgaacaagatgagcttgcaaaatttgcttcttactcaacaagataacaaaaagcttggcataaaaattggcacaatagaaacttggcatatgtcgaaaataagaaaaacccttgataaacaagggtttttcgttagttatccaatagaaccttccatttcgaacttaatcaaacggttcatttcaactgcgtattccattggaagctcttttgtgaatggctcgatgaagcccattacgatcatttcagttgcttcttcttcagaaataccgcggctcatcaagtagaagagctgctcttcagatactttagacactttcgcttcgtgctccaatgaaatgttatcatttaagatttcattgtaaggaattgtgtctgaagttgatttgttatccataatgagcgtatcgcactcgatgttagagcgggcgccttccgctttgcgtccgaagtggacgattccgcggtacgttacttttccgccctgttttgaaatcgattttgatacgattgtagatgatgtgtttggtgcaaggtgaatcattttcgcacctgcatcctgatgctggcctttacccgcaagagcgatagaaagcgtcataccgcgcgcgccttcgccttttaggatacaagccggatatttcattgtcagcttagaaccgatgttgccgtcgatccattccattgttgcgttttcttcacagactgtacgctttgttacaaggttgtaaacgttgttcgcccagttttggatcgttgtataacggcagtagccgccttttttcacgatgatctcaacgaccgcactgtgaagtgagtttgttgtgtaaacaggcgcagtacagccttcaacataatgaacgcttgcttcttcgtcaacaatgatcagtgtacgttcgaactgacccatgttctcagagttgatacggaagtaagcttgtagcggtgtttcaaccttcacgcctttaggcacgtagatgaaagaaccgccggaccaaacagctgagttaagcgccgcaaacttgttatcagtcggcgggattacttttgcccagtgctcacggaaaatatcttcattctctttcagcgcgctgtcagtgtctttaaagacgatgccttgtgcttcaagatcttctttcatgttgtggtatacaacctcagattcgtactgagcagaaacacccgcaaggtatttttgttcagcttcaggaataccgagcttgtcgaatgtttgtttaatttcttcaggaacttcatcccaagaacgctctgaacgctcagacggttttacgtagtacgtaatttcgtcaaagttcagtgagtttaaatctccgccccattgaggcatcggcatattgtagaaatgctcaagtgatttcaagcggaagtcaagcatccattgaggctcttctttcatgcgagaaatttcttctacgatttcttttgtcaatccgcgctctgaacggaaaatggaaacgtccttgtcgtgaaaaccatacttgtattcaccaatatcaggcatttttttagccatccattttcactccaatccttttaattgccgccttcttctttcgcgactcctttttcaagtgctttccatgacagggttgcacatttgatacgggcagggaattttgaaacgccttgaagggcttcaatatccccgagatctatagaatcatcatactctttcccttgcatcatatccgagaaaatcttagacatggaaagggcagtttcaatatctttccctttaatcgcctgagtcatcatcgaagcggatgccattgaaatggaacagccttccccttcaaacttcgcatcttccacgatgtctccgtcaagcttcattgtcagtctgatgcggtcgccgcatgtcggattgttcatatccacgacaatgctgtcattcaaaacccctttatttcgcgggtttttgtaatgatccataatcacctgtctgtacaatgtatctaagtttgcattaaaagacatttgtaaaatactcctttgtcttttgaagagcttccacaagcttatcaatctcttcctctgtattatacagataaaagcttgctcttgcagtagcagttacatccagccatttcatcagcggctgcgcacaatggtggccggctctgactgcgattccctccgcatcaagcacagtcgccacatcgtgcggatgaacatcatcaaggttaaatgtgacaagcccggcacgctcttccggcccgtaaaccgttacgccgtcaagctggcggaagcgttcaagcgcataagctgcaagcttgtgctcatggcgggaaatctcatcaagaccgatttcttcgagaaaatcaatggcggcaccgaggccgattgctcctgcaataatcggagtacccgcttcgaatttccacggaagctctttccaagttgattcataaagcccgacaaagtcgatcatttcaccgccgaattcggcaggctccatgttttccagcagggctttctttccgtacagcacaccaacaccagtaggtccgcacattttatgggaagaaagcgcaaagaagtcgcaatcgagatcctgcacgtcaattttcatgtgaggcgtgctttgtgcaccgtccaccacaatgacagccccattgtcatgagcgattttcgccatttctttaatcgggttgaccgtgccgagaacattagatacatgagacaccgcaacaatttttgtgttgcttgtgaccgtttctctgacgtcttctaaagaaatcgttccgtcttcctgcagcggaatatattttaatgtggcgccagttgcttttacagcctgctgccacggaatgatattcgcatgatgctccatgtaggtgatgaccacttcatcaccaggtttcaggttggcgcgcgcatagcttaacgccaccatattcagtgatgtggtcgtgccttttgtgaaaataatctcagccattgacttcgcgttaataaactttcggactttttcacgcgctccttcataaccatctgtcgctctggttccaagtgtatggacgccccggtgaacattggaattgtattggttataatacttatccagtgtttcaatgacagcacgcggcttctgggaagtcgccgcgctgtcgagataaacgagatcatgtccgttcacttgctgatgaaggatcgggaactgttcacgaatatctgtgatattcattacttcactttcctttcgataacagaaactaattgtttcttaacgccttcaatcggaagttcatttactaccggtgcaaggaatccgtaaatgactaagcgttctgcttcttctttcggaattccgcggctcatcaggtagtaaagctgaatagggtccacacggccgacagatgccgcatgtcctgcagttacatcgtcttcgtcaattaaaagaatagggtttgcgtctccgcgtgctttttcgctgagcatcagcacgcgtgattcttgctccgcattcgctttagaagcgccatgttcgattttgccgattccgttaaagatagaagaagcggaatccttcatcacaccgtgcttcaagatatagccttcagaagctttaccgaagtggatgatttgtgttgtgaagttttctgtttgctctcctcttccgacaacaaccgttttcgtatcgccgtatgtgccgtcaccgtaaaggtttgttgtattttcggaaatcgtgtcgccgtcgttcatcaggccaagagcccactcgattttgctgtcgcgtccgcgcgcagcaccgcggcggttcacataagttgtcacaccgcttgacagattatccaccgcaccgtatgtcacgctggcattatcacctgtgatgacctcactgataatattgaagacagcgtctttcgggtttacagtgctgatgtagttttctacatatgttacagagctgtggtcttcagccacaatcagcacgtggttgaatagagctgtatcattgctttcgtggacataaacagcctgaaccggcgtctccacctgaacatttttcggaacataaaggaatgctcctccgttaacaagagccgcgtgaagtgcagttaacttatgttcgtcaaccttcacgccgtccttcataaagtatttctccaccaagtcgctgtgctcgcgtgcagcagtcagaatatcagtgaagatgacgcctttgtctttcaattcttgagaaagagaaagatgtgccggcgtctggtcacgctgtacgtataatgttttatcttcgttttcaatgtcgatcagcgcttttacttcatcagtcaaatcttctaatgaagaaagcggttcgttatccactgtatgcttcgcgaaattcgtgaagttccagtttgtgatttttgttttgtcaggtttcggcatcggcagatcctcagcttgttcaagagcctgtaagcgcaggttcttcagccaggcaggttcttggtgcttttcggaaaagcttttgagatactcctgatctacggatagttttgtacctagtgtcatattaatccccctaacgcttacgcttcttggccaacagtttcgtcttcaatgccaagttcttgtttgatccagtcataaccttctgcttcaagacgctgtgcaagctctgcaccgccggattttacaacgcggccttgcatcataacgtgaacaacatccggagtgatgtagtttaacaggcgctgatagtgagtgatcatcaggcagccgaagttttcgctgcgcattttgttgatcccttttgatacaactttcaaagcgtcaatatcaagacctgagtcaatttcatcaaggatggcgattttcggttcaatcatcattaattgaaggatttcgttgcgttttttctccccgcctgagaagccttcgttaagatagcgctgagccatttcagggtccatttcaaggaactccatgttttcgtccattttgcggatgaatttcatgagagaaatttcatcgccttcttctctgcgcgcgttgattgctgagcgaaggaagtcggcatttgtcacaccgctgatttcacttgggtactgcatcgcaaggaataagcctgcctgcgcacgctcgtccacttccatctccagtacatctttgccgtcaagcgtgatgctgccttttgttacttcatatttaggatgccccataatagcagctgataaagtggatttaccagttccgttcgggcccattactgcgtggaattctccaccttttatttcaaggtttacaccctttaagatctctttcccttcgatttcaacgtgaagatctttgatcgttaatgttgaagcagccatatctatacctccaaaaatatataatcattattctcattttattctcattctaattttataacaaatgaaaagtaaatacaactttttatcgtgccttgcacattcctcaagtttaacaaagatcagcactttattaaagcgattgaaaaagaaaaagagtggattcccacccttttttaaaagattgattttctcaataagctcccgcagaaatccgcttgcttttttcgtaatcaagctctctctgccgctctactttcattcttgtttccagccggcgtccatattcctcgtatccaattccgtgtgacagctgcatcgctttttccatttctgacgtataatcgaggttcagtctgtcctggctactgcaaataatgaatcaatcccttcatatatttgctttttattgtaccagtgctgcgttggatgccgcaaaaacgatttggcgtgaaatagcggcagatgagacgaaagcatcctttcagaacaaatgagaatggtttttcggaatattccttctcttaatgcgtggtgtttccgaattcctcaatgcactgttgaacgactgtcacgccttggctgaaagctgcgccgcctccaaatgccgctgccacactgacggcttcgagaatgttttcttctgtcgctccctgatcgagacagccttttgtatgatagatcatgcaatattcgtcctgagcattgatggcaattccgagggcgatcagctgtttttctctttcagtcagagaattcccggcaaagcactgttcagtaaattcgttaaattttcttcccatcagcggcatcttttgttcaaatgtgcctaaaccatgtttatattgttttaacgcgtcctgcatgcttcctctgtcttgattcaaagaaaatccctccatctgtttaacattcctttttattatgaacagcttttaggaaaatacgcgaaaaaaccccggaattctcatccggggtttcagtcttattcagatacaggaagcacagctccgtcgtattttttctcgatgaagtctttgatctttttagagtgaagaacttccatcagcgctttgatttttgcagaatcttcttcgccttttcttactgcgatgatgttagcgtatgggttgtttttcgttgattctacttcaattgcgtcttttttaggatttaatttattttggatcgcatagtttacattgatgaagaccgcgtctccttctttgttttcatatgcttttgccgttaattcaggcgctactttttcgaattcaagatttttcgggtttttcttaatgtctttcaatgttgcgtcaactgtttccactttagaatcaagagtgattaatccagcgttttcaagcattgcaagcatacgtccttgttcagcaacgttgtttgtcagaatgattgtcgcaccgtctggaaggtctttcagtgatttgtatgttttagagtaaataccgaatggctctaagtgaacagcgccggcattcacaagtttgtaatctgtgttttctttcatttcttgctcaaggtaaggaatgtgctggaagtagttcgcgtccacttctttatcagctaaagctttattgtacattttgtaatcactaagcactttcactttcagcgtatagcctttttctttcagcaatggttcagcttcttttaaaatttctgcatgcggtgttttcgttgccgcaacgacaatttctttcttgccggattcagcgccgttattcgaaccgcaggcagccataactcctgcaaatacaagcagtaatgcacccaaaaatagctttttcaatgtaaatcctcccttatcgtttgtctataatatttgttattagatcaccgatgatttgaataataaacacgatgattaaaataaacacagtagcaacgaaggtaacatcagcgttattagactgatatccttctacgtacgcaaggtttccaaggcctcctgaaccaatggctccggcaattgccgttgagccgatcaaagcgatggctgtaaccgtaatgccagaaataagagcaggcattgattccggaatcagcactttgaaaataatcgtagacgttttcgcgcccattgatttagctgcttcaatcacacctttatccacctcacgcaacgcgatttcaacaaggcgcgcgtaaaatggtgccgagccgattaccagcgccggcaatgcggcgtttggccctaagatcgtgccgactaaaaatttcgtaaaacctaatagtaaaataattaaaataaggaacggaatcgatctgaatatgttaacaacggccgcaatcactgagttgaccgctttattctgccagaggcttcctttgctcgtcagaaagagcagcaagccgaggatgaccccgatgacaaaagcaaacagtaaagaaatcagcgtcatataaagtgtttcatatgtcgcgttccataattcagttaaatcaacgttcgggaagtatttttcaaacattcgtgatcacctctgctttcacctgtttgtcattaatgaaacggatcacgttttgcacttcttcctcgtccccgtcaatgtggatgaacagtgaaccgtaagccccatccttcgtctgcgaaattttcccttgcagaatattgacgctgacattgaagtttctgatcatctctgtaatcagaggctgttcagctgactcaccgacaaatgtgagctgaaccatttttcctgatgctgtatcatcaagaaggtgctgaagcgtctctttcgtttcttccggctctgtcacctgctgaacaaatcgttttgtcatttgttcctttggatttttaaagacatcgagaacctcgccttcttcgaccaccttgccgttttccatgacggcgactctgttgcagattttgcggatgacatgcatttcgtgcgtaatcagcacaatcgtcaaaccgagtctttcattaatatcggacaatagatccagaattgaatctgtcgtttgcggatctaatgctgatgtcgcttcgtcacaaaggagaaccttcggattgtttgcaagcgctctggcaattccgacacgctgcttctgaccgccgctcagctgggacggatatgatttttcttttccttctaaacctaccagtttaatcagttcattggcgcgcttgatccgctcgctctttttcaccccggcaatttctaaaggaaacatgatattatctctgacagtccgcgaccaaagcaaattgaaatgctggaaaatcatactgatctcatggcgtgcttttcttaaaccgcgtccatttacttcattaattttggttcccgccacttccacggttcctgaggttggtttctcaaggccgttcagcagacggattaaggaactcttaccagctccgctatatcctataattccaaaaatctcaccttttttaatggaaagcgagacattttggacagcattgacatctccatgtttcgacttgtaaacttttgaaacatcctgaagattgatcaaagcaatcacctgccttaacactattctaagaaatcttccggttttttctgcaaaagaaaagcctttctgcacacttgagcagaaaggcttatataaaatgcctttctctcatctttcaaagctgaacgcttcgtgtgaattggcaccatttcaacagtgttgatggttgccgggcttcatagggcacttccctccacctctcttgataagagaaatatatagtctttttcgtccggaaattcttaatgtagaatagcacggcgaatgattaaatgtcaataaaataaatgatgtcaacttttactattataataatttattattttttaattttttaaaatcctctgaaaaaatccatttgtcagccagagaatggcttccagctttaacagggccctgaatgacccctttactttgaggcttccgctctgaatcaggtgctgaagggaaatgtctccgtgcaataaatcaataatttccgtttggtttccgtaaaaggtcaggttggacgtttggggcggagaaacttttttcatttctccctgttcgtttattgagacggttaaggcttctgcttctccttggaaggtaatgagcaatgttgaggcattcaaaaggggttttaaaaacagatgctgatactcatcctctaaaacttccgctttctccatatgtacaacctcctatttgttggtcatacatacacatttctctctttgtcgcaagaacccctttataaaacgaacgacaatttcataggatatgctgagaaatatgtcataaatgggatgcggaagatgatttttgtttgatcagctcatataaataagaaacggaatgaaatgcatatcctctttcgaccatctttccgcctttaaacagcagaaaacaagggacgctttcaatttgatacgcttttgcgaatgtcggagagtaattgacattgttttgatagaaggcgacatccggcagcatttctttcaccactgtcagcattttgcttgcaagctggcaggtgccgcaaaacggagtatataaatatagaaggtacacatcatcttcaatgtgatcaagttcgtgttcttggagttctttcatgctatacacctcgggactttctttcaagaaaaatagtatggacattcagattcgcacgcagtaatacagaagcgacatggtgcctgggagcagccgctacttccttataggctctgtcgatatggagatggcaggcttcattaaattcacgcttcagctgttttctcaatttctcacctgattcatcagcatcaactaatatatagacgtctttatcataaagctcgtcagccaattcctcgagcctcagctggctgattgttccgtttgtgcagataatgcgcaccggttcattcaggacgctttcgattttctctttatctgatttcccctcgacaatcataaccttttccagctcatccatcttcatcttgttcacctgccgcgtcaaatttgaaacgttcagattgtaaaagaaggcagtgaaattcaccgccaacattaacaccagccgttttcgtagtcacaatctacatattttgcgtcgtctccagagaccacatcggctgtcttataaaatttctcattttcaaaggaataaccggacttaagctcatattcattcatgcttgtcatttggccgatcatctcattatcatgatataacgagagccggccattttgaaagcggcctgtcacgtcattggtgacatcgagcttttgtttgtcgaaagccatattggacacctcccataacgttagcgtgtccaattgcttttacggctatcctgttttagtcttcttgtgtcatctcttcgtattgctctgctgtcatcagtttttcaatttcagaagcgtcagatggctcaacgacgatcatccatgctttttcgtacggagattcgttgacgaattccggactgtcatcaagatcttcgtttacttccacaaccgttccgttaatcggtgcataaagctcagataccgttttaacggattcaacactgccgaatggctcgtccgctttgatttcagcgcccacttcaggaagttcgacaaacacgatgtcgcctagttcggactgggcaaaatgcgtaattccgattctggctttttctccttcaacttttacccactcgtgttctcctgagtaacgcaaatcttttggtatgctcaattgaatccctccattttttacagcactacaataagaagataccacacttttcaaaaaaaatttacattaagcccagttttcttcaaattggtcttctttaaatccgacagtcactttttcaccgtctgttgtaagcgggcgtttgatcagcataccatctgaagccagcagctcgagctgttcgtcctctgacatgtgatacagcttttccttgagattgagctcgcggtatttcatgccgctcgtgttgaaaaatttcttgagatccagcccgcttttttcataaagcgcttttaattcttctttgcttggcggctgctcagcaatatgtatttcgtttatttctttcccatgctcttcaagccacttctttgctttgcggcacgttccgcatttagggtaccagtaaaaagttaacgacatcttcttccccctcaataaaataatcgaggttattttaacacagtttgttttaaaaacctaaaacagtgcttcttaaaaaagagctccgcgcatgcggagctcatggccaatcagacagtatatttctcagcctcaaaaatgcctgccgccgcctcgcgttttttctgaatcacgtttttaggcgttacgcgtgtcagcttgcgcagagcggaaagcatcatgcggagtgaatctccttcttccattgcgataagggattccttcgcatgcgcttcaatttcgttaaaggcctcttgaacgaaaatttctgtgtacagcaccttttgcgctgctttttcagcgccttgtgcggcaatggccttttccgttctgagcacggctgattccattgcgtatacattgctgacgatatccgctacgttcacgagaatttcttgctcacgatcgatcgcttttccgtatttttgcgcggctaggccggcagcaaacaacgcaatttttttggcttgcttgacgatatatttctcctgctctaagacgccgcttccaggctcttcaggcataagcatcatgagttcttcctgcagcgactgcgctttttcgaataaaggcagctcgcctttaagcgcttttttcaggaaggtgcttggcacgattaaccggttgatttcgtttgtgccttcaaaaatccgattgatccttgaatccctataggccctttctacttcgtattcctgcataaagccgtagcctccatgaatctgcacgccttcatcaacgatataatcaagcgtttcagagccgaataccttattcagagagcattcgatggcgtattccgcaatcgatttggcgatttgccggccgtccttgagatcttcggccgtgaactggctcatattgtcttcaaacagcccgacggttctgtatacagagctttccatcgcatacagccttgaggccattgtcccgattttttcctgtgtcaatgaaaaaccagcaatcggcgttttaaattggcggcgctgatttgcatatgccgcagacagctcgatgacgcgtttagatgcgccgattgtgccaaccgccagtttgtaacggccgatgtttaaaatattaaaggcgatgacatgccctttgccgatttctccgagcaggttttcctttggcacttcagcttgatccagaatgagggttcttgtcgatgatcccttgattcccattttcttttcttccggtcccgtggagacacccgggaactctttttctacaataaaggctgaaaacttgtcgccgtctatcttggcgtaaaccacaaatacatcggcaaaagcagagttggtaatccactgtttttcccctgttaatacataatgggttcctgcttcattcagcacagctgttgtttttgctccaagtgcatcagatccagagccaggctcagtcagagcataagcggcgatcttttcgcctgaagcgagtccaggcaaatattttttcttttgttcttctgatccgaaaaagacgatcggcaaggaaccgataccgacatgcgcgccataagaaagagaaaagcttcccgcacgcgaaaatttctcagtgatgagtgccgagctgattttatctaggccgagcccgccgtattcttccggcacatcggcaccaagcagccctagttcgcccgctttcttcaacagtctgacagaatgctcgaattgatggttttcgatatcatctatatgagggagaacatcttgctcgatgtaatcctctgttgttttcgcaatcattttatgctcgtcagtgaaatcctccggtgtatacatttgatcgtatgtgacatcctcgattaaaaatccgccgcctttttgtacgtcagccgctttttttgccatttgtttttccccctttagcataattcaaatacaccggccgctcccattccgccgccgatacacatggtcacgactccaaattgctcgtttctccgtttcatttcatggatgagtgagagtgtaagctttgtgcccgtacagccaagcgggtgtccaagcgcgattgcgcccccgttgacattcactttttcttcatcaattcccaattccctgattacttgaatggcctgtgaggcaaaagcttcattcagttcaaacaagccgatgtcctgcagctgaagtccggcaagcttcaaagcgcgcggaatcgcttccaccggtccgattcccatgacttccggcggcacgccgcctactgcaaaggaacggaatttcacaagcggcgccaggccaagagcatcggctttttcccggtccatcagcatgacagccgccgctccgtcacttgtctgcgaggaattgcccgcagtcaccgtcccatcaacggaaaaggccgggcgcaatgtcgataagatgtctgcagtcgtttgcgggcgaacaccttcatcctgagaaaacacaaactgtttttccataggcttatggtcttctccgatttctgtcaccgtcacttctacgggtacaatttcatctttaaattttccttctgcaagggctttagcagcgttttggtggctgcgaacggcaaacgcgtcttgatcctcacgggagacgccgtattttttcgcgacttgctcggctgtgtggcccatgctcatataatattccggtgccttttctgccaaagcaaggttcggacgggtaacatgccccatcatcggaacttgcgacatggattctgctccgccggcgatcgctgtatcgtaggcgcccagcataattttttctgctgcatatgcaatagactgaaggcctgaagagcaataacggttaactgtaatcgccggaaccgtgtacggcaggcccgcgagcgcaccgatatttctcgccatattaagcccctgctccgcttcaggcgttgcacagccaataatcaaatcgtcaatattgccttcgtaaccgcctgcccgtttcagtgtctcttttacacaaatcgctcccaaatcatccgggcgaacggtggccaacgatcctttttttgcttttccaaccggtgttcttgcacctgacacaatgactgcctctttcataagctccctcctaattccgtaaaggtttacctttcacaagcatatgctgcattctcgcttgagattttgcctctcctgacaaactcaaaaacgcttctctttcgatctccaataaatactcttcatcaacctctgtaccaaacggcacttttccgcccgcaatgacataagcgagttttttcgcgatcttaaaatcatgctcagatatatagccggacagcttcatctgctcagcgccaagcaagagtgccgcataaccggtttctcccggcaccttgaccttttcttttacaggcggccgccagccggtatcgtataaagatgcggccagctgcttcgcatcgtataacaggtggtcttgattcacgctgatctgatccgtttcttttaagatgttcatctcacgagcctcttgagcggaagcggacactttcgccatcgcgattgtttcaaatgttttcattgccgcattcatcggatcatggccgcggcgaagatggttgatgtacagctctttgttacctcctccgccagggatgaggccgacaccggattccacaagtcccatataggcttcgcttgccgcttgaatgcgcgccgccggcaggcatgcttccgttcctccgccgagcgtcatgccaaatggcgcggcgacgaccggtttcgcactgtatttgatcttcatcatcgtctcctgaaaacggcggatcacaaaatcaacttccaaaaagttgtcatcttggacttccattaagatcatggcgagattcgcgccgacgcagaaatttttcccttggttgccgatgacaagccccttgtaattccgttctgtttcctctaatcctttgtggatcatttgaatgatatcgaggccgatcgcattgcttttcgaatgaaattcaagaagggccacatcatctccaaggtcaattaagcttgctccgctgtttttcgcaatcacgccttttgtttctttaagtgcttgtaaatgaattcgttttttattttctttcacggctctgtattcgccgcggtcataataaaataccgttccgttctctttgatgtagaaggtttcatttcctttgtccagcatctcttttatccagccaggcatatctgctccaagctgctcaagcttttccgctgactgcttgaggccgatggcgtcccacatctcaaaaggtcccagttcccagccgaatccccacttcatggcttggtcaatcgcatgaatatcatcggcaatctcgccaagcagctcggctgagtaaagcagggtttgagaagtgatattccacagcaaacggccggccctgtcatccgaataaataagcgctttcattttggcttttgtcccttttgcctgttttgccgcttcaagtgccggtgatttcatttttgtccgctcgccgtaagtaagcgtcactgggtcaagctcataaatcgtttttccttcttttttataaaagccttggccggccttgcttccgatccaccctttttccagcatatcgttcatgaagcttggaaggcgaaacacttctttttcatcgccatcagctttgtcatacacatttcgggcaacgtgggcgaatgtatcgaggccgaccacatcaagcgttctaaaggtggcgcttttcggcctgccgatcagcggtcctgtgatcgaatcaacctccccgacctgataaccgcctttcagcatttcttggactgtcacgagaagcccgtaagtcccgatgcggtttgcgataaagttcggtgtgtcctttgctgtaacaacgcctttcccgaggacattttctccgaaagctgtcataaactttaaaatatcaggatccgtttccttaatcggaatgatctctagcagctttaaatagcgtgcgggattaaaaaaatgcgttccgagaaaatgggctttaaaatcatccgaccggccttcagccatttcctgcactgatatgccggatgtgttgcttgagacgatgcttccagtctttcgatgttcatccacaagagcgaaaattttctttttgacttcaaggttttcgacaacgacctcaataatccaatctgcttctttcagtttttctgcatcatcctccagattgcccggtgtaatataggaggtatttttcgctgatgtgaggggagcgggcttttgtttcagcagttttttcaccgcctgccggctcagcctgctgcgcatctccggactgtccttcgtcagcccccttttttcctcttcctttgtcaaatcgttcggcacaatatctagcagcaggacaggaattccgatgttagccaaatgcgccgctatcccggaacccattacccccgatcctaaaacggctgccttccgaatgtgtttgtgcatgagatatcccccttgaacattgaatgaatagtcattcattttttgaccaaaaaaaatgaaacccgtttcttctttcatcttaaaagatttccggttcgacttcaatagctaatttgttatttttttgtatgaagcctataaaagtcgggcaacttaagcccggaggtgaagggaatggtacgagagaaaaaaaatccgtcttcagcggcagtcagcgcggcgagcgtaaagggagatgccggtccgactcagcattacggcggcggaaaactgacaagtcaaaatcagcagtataaaaaacataacatggaacaatcataatgcagctgcttcccgcggctgctttcactttttcaaaattccttttaacacaaacgctgcattggcaggccgctcggcaattcttctcataaagtagctgaaccagtccgttccatatgggacatacacacgcattctgtagccttccttggcgagttccttctgacgctccggcctgatgccgtatagcatttgaaactcaaattgcgacgcggggatttgatgttcggtgacaagctgtttcgtaaatgcaatgatgtcatcgtcatgtgtggcgacagccgtgtagttcccgcttaacaactgcagctttattaagctctgaaaatgaaggtccgttcctcttttgtcgggaaacgctacagccgcagattctttataagcgccttttacaagtctgagattcggctttaagtcccgcatctttctgatatcttctgccgcccggtacagatacgcctgaatgaccgtgccgagcttctcaaattcctgtttgcattgcctgtaaatagaaagtgtctgttcataatgagtatagtcttccatatcaatggtcacagcaacatcatattgcttcgcaacggaaagaatggcgcgcaaatgagtaagagcaagttcttctgaaagatcgagcccgattgaggtcagcttaagtgaaagctctgaattcaattgatgttcggcaatggcttgaatggctttcttgcattcctctgcgacttggtttgcttctttttccgaagctgcatactcgcctaaataatcaattgttgcacacaaaccggatctgtttagccttttgacggtcttaaccgccgattcaatcgtatcccctgcgacaaaccttcgtgctccaagccgcgttccgtatgcttttgcgaacttggtaagtgttttattttgagataagaataaaaacacatgtctcagcatccgactccctcccgccgtcatcttcaaaacacctgtatataactcccagtctgaaggaaactataaaatgaacagaaaccaaaggaggatcacaatggataatcagcagcaatctcaaatgccgccttccgttatttcgacaaaggatcatttgtatctcaatgacatgctgaactggaatttgctcgcgatgaagaaagcgcatttcatggcgcagcagtgccaggatcaaacgttaaagcaagaactcgaccgcgtcggacacatgcatcatgatcactatcaaagaatattaaagcacctgcagccaggccagcagcagtccggctacatccaataaggaggcgccagaatgaatcagcaaaatcaaaaaatcagcaacccgcagacacctgtaccgacaacatcggaaatgaatgacagagatttcgtcaacgaattgctgacaaccgaaaaatacatgacaacagcttattgcactgctttgcacgaattcagccacgagtctctttatcaggatattcaatccatttttgatgagtcacaaaaagcgcaaagaaaactatatgatctcatgtttcaatatggatggtattctgttgaagcggaggatgcacaaaagctgcagcagtcctatcaaaaattccagcagaccattcagcagcagtctccttatcagcaataacaacattagtaaaaaggatacgatgttctttagggcatctatcctttttttgtgtaaaatcagttgacttttcatttacgcttatttatatttaataagcattaactattttgtcattaaaatatatatacagtgtatgtaacagaggggaaatgaatatgaagagtgcggatcagttaatgtccgatattcaattatcgcttcaggcgctctttcaaaagatacagcctgaaatgctggaaagcatggagaaacaaggtgtcaccccagcacagctgtttgtgctggccagcctaaagaaacacggcagcctcaaaatttctgaaattgccgagcgtatggaggtgaagccaagcgcggtgacgctgatggcagatcgccttgaacaaaaaaatcttatcgccagaacacacaacacaaaagacaggcgagtgattgatctcagtcttactgacgaaggagacagaaagttcgaggaggttttggcaggcagaaaggccattatggcgcgctatctttcctttttgacgaaggaggagatgcggcaggcggcgcatattacagcaaagctcgcacaagcagcagaaacggatgaaaagcaaaacatgaaaagaggaaacggatgaaaatgagtaaagaaggcaaacaatcaaaacgaacgttattaataacaggcttaattattgccatgtttttttcagcccttgacggtaccattgtcggaacggccatgccgaaaattgtcggtgatctgggcggtttgagcatgatgacctggctgacaactgcatatttgttaacatcaacaaccattgttccaattgccggtaaactggctgatttattgggacgccgcattgtctatgtatcaggtttaattattttcatggctgcttctgctttgtgcggaatggccaacaacatgacagaattgattatcttccgtggactgcagggaatcggcggaggcatcatgatgccgatggcgatgattgttatcggtgacttgttcacaggaaaacagcgtgctaaattccaaggtgtctttggcgcgatttacgggctggcttcagtgattgggccgcaaatcggcggctggattgtagactcgttaaactggaaatgggttttctatattaacctgccagtcggaattattgcggttatttttattgccagaggattacagggacgccagcagactggtccgatcaacttcgatatcgctggtattttcacaatgattgtcggtgtggtcagcctcctgctcgccttaagctttggtggaaaagattatgcatgggattcatggcagattcttgggttgttcgctctcgcactgatcggcattgtcagctttatcatcgtagaatcaaaagcaaaagagccaatcctgccaatgtatttatttaaaaacagaacatttacatttctaaacttgatcggcttctttatgagtatcggtatgtttggcgccattacgtttgttcctttctttatgcagggaattgtcggtgtaagtgcgtctgaatcgggtacaattatgacaccgatgatgatttctatgattattacaagtatcatcggcggacagcttgtttataaaatcgggattaaaccgcaaatcattgcaggcatgctggttatggccggcggattcctgctgttaacgaccttggatctcgacacgagcaagcttgtcgctacatcttttatggcgattattggtctgggaatgggtcttgttatgccgattctgacattggctttacaggaaagcttttcgaaggaggagcttggagttgtcacttcatccagccaattcttccgttctatcggcggaacattcggcattaccatgctgggagccgtaatgaatgcgagatcaggaaatctattaacagataaattggttccatatttagactctcttccggcacaggcaagctcgtttgccgcccagctaaagggtatgattgatacaaatccgcaagggctgctgcaatcactgttcagtccggacgcggtcaaacaaatccctgcggctttctcatcccatattgtgccgattttaaaaacatcgttgatggattcgctccacagcgtgttttatacgggcctgatctttatcgcagtcggagccgtattcaccttgttcttaaaacctatcaagctatcaaataagaaagcggaagaccaacaagaaaaagagaaggcggcaaaagccgttgaatcaccttcccattaatagagcaccccgcgggtatcaatccgcggggttttttattcaatcatctgggctcttccatttccgaaagaccaatcctcagcctgatttccggccagcatgataaacacatcttcttttcttacaccaagctcggaatgaatccggctcgcgattgagcggtaaagtgcttttttctgttcagttgttcttgactgtttcagtgtaaaatgaatgtatatcagttcatcagtacgctcgacttggagataaaatggatcataaaaaaattcgcttttttcatattgtctgatgacttggaaatagtcatcttccggcacattgatttcttcaatcatcgattggtggatagtcctgctcagtttttgaagccacacttcgcttcttcccgaccgtaaatgaatctgtacaaatggcatctccccgcatccctttctttacagcgtctgtccgctgtcaattgtgataatttggcctgtgagtgattcctgttcaattagtgaacaaatcaatttggcaacatcatctggttcagcaatacactgcagcggcaaagagccgatcatgcttttcattttttcttcccgtccggcccaccatctcgttgccacagctcctggtgctacaccgctcactctgatttcaggcgctaaggcgtgggccaatgatttcgttaaaccgtgcaccgctgattttgatactgcgtaaggcatagatgagccgacaccagttatccctgcgatgctgccgacgtttacgatcgccccggccttgcttttcttcatgaacggtaccactgctctcgcgcaaaaaaacatccctttcacattgacggcatacagctcatcccagacgtcttctgtcgcagcctcaagatcatccattggaatatgccgtgtaatgcttgcattgttgactaaaatatcaaccgtgccgtgtgtgctcacgattgcttgaatcatatcctgcacgtcgctgtttttggatacatctgcttggatggcgaaggcttgcccgccagctttttgaatcttttccactgtttcctccgcttctgattgcgagcgtgaataattcaccgccacaatcgtcccgcgctttgccaattccatactggctgcttttccgattcctgtgccgccccccgttacgagagctattttgttcaagacattcattgccgccactccttgctgttgactaaagtatatttctgattccattgtaatccagctttgatgttacgtataatgattgttaaagatactagatatcactcagattgatagtaaacgaacggaggagttcaaaatggaaagcggagatttacgtgtgtttcaaatggtagctcgtgaagggagcattacgaaagcagccctgcagcttggctatgtacaatcgaatgtcacggccagaattcaacaattggaagctgagctgggtaccacactgtttttgcgccataatcggggcatgacactttctgcaagcggaaaattgctgctggactacgcaaataaaattataggccttcttgatgaagcgtctaaagcgctctcatcctccgcagaaccaagcgggccgcttatgatcggctccactcagacaaccgccgcggtaaggcttccaaagcttctggcatcttattatgaagaacatccaaacgtccagctgtctttaacaacaggacatacgcaatttctccttgataaagttcttcgttatgaattggatggcgcgtttatcggatgcgaatgccatcatcctgagctcgaatcctatcctgcgtttgaggaagaaccagtagttgtttcggctgcctccgtgcccgatgttgaggaagccatcacaaagccgattctcgtttacagcacaggctgttcgtatcgagaaacacttgaaaaatggctgcgctccgtcggtgtcacacagccggtcattatggaatttgggacgcttgaagcaattatcggcggggttacagcaggtcttggcatctcgttgctgccaagaacggttgtgcagaaacatgaagcagaaggatcaattcgattgtacccgctgcctgaagcgctcagccagatgaaaacagagtttattgttcgaaaagattcgtttatcagcagcgcgctgagaacctttatggattcctttacgccagataaaacggctgaatcacaaaaaagcagtctgctataatgtacagactgctttttggctattgtttgtttcgatgcgcttcatttaattccttaatatgctgaatgatctctttaatgccctgctttgcgtcggggtatgtcgcattccaatgcttagcgagcggtggcatgctcttggctatatgcgtgtacaaaatccattgcttcacttcttcttttagctcatcgtttgtctcaccaagcagaagctcagtatacttctccagcaatccatccagctgctcctgaagtttttgttccatttgccatcttcctttcgaaaaaacagcaaggagctttctcaattgaaagctccttcgctgcgttatttatccatgtgatgtgaaagccgcttcctggacaatgcatctgcccctgccatgaggaatgcaaagaggcgttccgaagagcgggtcctgtgtaacctgacagttcatagaaaacacattttgcacaagatcacaagtgatgacctcttccggacggccttctgcataaatccgtttatcttttatggccacaagatgatgcgcatagcggcacgccaagtttaagtcatggagaaccataacaatcgtccggccttccttttcattcagctcaaacagcaaatcaagaatttcaatttgatgcgtcatgtctaaatacgtcgtcggctcgtcaagaaggatgatatccgtttcctgggcaagcgtcatcgcaatccaagcccgctggcgctgtccgcctgacaaagaatcaacggcgcggtcagccatgtcctcaagctttgttgctttaagcgctctttcaactgcttcctcatcctcttttgaccactgcttcagccagttttggtaaggatatcttccttgcttcaccagctgatgcaccgtcagcccctcaggagccgaaggaccttggggcaggattgcgagctcttttgcgacttccttcgtcggaagcttggcaatcgctcttccttccagcagcactgaaccgcctctcggcttcatcaggcgcgctaatgaacgtaaaagtgtcgattttccgcagccattgctgccaataaatacggtaatttcacctttgggaattgttaaattcaactcatcaataataacggcatccccgtatcctaagctcagcgtttctgtagaaattgcactcatacccataaccgctcctttttgctggctttttagcagcactatgtattgcacgttttctatatacatgcttttaagtcaattatcatcaatgcaagtgattccgatattcagccatttgatatggtcatatatccctcattgtagcagaaaacactgactttgaaaatcattttcaattagttttatggacataattgacgtttatgggttttttatcacaagattacttcttgatttctctgatggagccgtccttcagcttcaattttaaatcgatatgatcataatgactgtccagattaaatgctgccagcacactgtgtatcacttctgtttcagccatttggtctgtcacggaaagctcgctcaaaatcattttcatctcatccaatgcttcttctccctcctgattgacaccggagagcttatcctgtatttccgctttttcctgagttccgttctttgtatagattccttcataacggttatgctcaccatccccgtagctcacacgaagcgaaaaattactgtagggaacggacttcagctgggtgacggctgtattttctccttctgcctgctgctggtcttcattgagacggcagcccgcaatcagaaccactgcgagacatacagccccggctgctctgaccaaatgcatatgtttcccccctgtaggattccatttattttaggtatatccagagaatgaaatcctcattcagagaagaattgaaaaagccggggcatttaacgccacggctttttctttaagattcggtcatttgtaaaaaggtttcggcgtcacgcacagccagcttgatggcattctcccagaaatcgcgctttgtgatgtcagcgcccaaatgcttcatcgccaaatcctccactgtcatagaagccgtatcgcgcaatagcgccatatacttctcttcgaatgtgtctttttcttcaagcgccaacgcgtaaataccaagagaaaacaggtagccgaatgtataagggaaattgtaaaacggcaccctcgtgatgtgaaaatgaagctttgatgcccaaaaaagcggatgatattcttctaacgcattgcagtatgcctctctttgcgcctcttccatcagctcattcaagcggctggccggtaccactccccgctttcgttcctcgtagaatctcgtttcaaatagaaatcttgcgtgaatgttcatgaagaacgcaacgcttctttgcactttatcctccagaagaacaagcttttcttccctcgtctcggcctgctggacagtcgcgtccgccactatcatctctgcaaacgttgaagctgtttctgcaacgttcatggcgtaggaacggtttaacggcctgacgttgagcattgcttcctgatggaacgcgtgcccgagttcatgcgcaagggtagagacatttgaggcgcttcccgaaaatgtcatgaaaatccgggattccccgctgtccggaaaactggtgcaaaagccgccgactctttttccgctcctgtcttccgcctcaatccagccgtcccgaaacgctttttcagtgaatgaggacagctttttgccaaacgttgaaaactggctggtaatgatatttgcggcttcatcatacgaatagacctttccgtcagaaccgatcggtgcctcgacatcgtaccagctgagtttttcaaggccgagcatggatgctttccggttcaaaaactgaacgaacggcttcttgttttcagtgatgacctgccacatcgtatcaagtgtttcttttttcatcctgttaatttgcagcggttccttcaggacattctcccagccgcgcgctttataggtttcaagccggaatcccgccaaatgattcagcgtgctgctgaaaatatcttgcttgctctcccaagcttggcggaaacgttcatatactgtttttctgacagtacggtcttgatgatccatcatattctccgcctgaccgacagacaattgcttgttttcaccgttttcctcatacgggatcgtcattttcccgacaaccatattgtataagtcactccaagcgtgatatccgtccaccgcaaggtttccgatcagtttttccttaccggggctaagcttttcggcaaccctctgtcttctttcatttaatatgtaagaaacatcgcgcaatcccggttttgttaacaattcattccacacgtcttgattaatgtccacaagtttatgatctaatgtaacgagcgacgattgaaaatctgcggaaagccgattcatgagtgcctgatgctctatagccttttgatcattgatattctgggcctggaggcaagcaacaaaagcgccggcctgctgaagcttgacggatgtctgttcgaataaatcaagcaacgcggtcagcccttcagcctcttcaggcgattcaggcacctgaaacgcatcagtcctgtcttgaaatgcacgcagactttgtgacagcttctcaatataacctttgaattcttccgattggctcccgcccttaaaaaatgaatcaagatcccatctttggcctaccccttgcagcgccatatcacaaaacccctttccttctttcgttctattatagaacaattctgaattattgtataaaaatttctattacaggcgtcatttcgtgttcaggatagtacaatagctgtagcagtttaataggagggttaggatgaataaaaaaatagccatcgtaacaggagcgtccagcggcttcggtctgctggcagctgtaaagcttgcccgatcatttttcgtgatagccacatcaagacagcctgaaaaagcggaacagcttcgagaattggctgcagcacacaatgtgtctgattctattcacattacagctctcgatgtcaccgatgaacaatctatagtctcattcggaaaagctgttagtgcttacgccccgatcgatttactcgttaacaacgccggaacggcttatggaggatttatcgaggatgtgccgatggaacatttcagacaacaatttgaaacgaatgtcttcggtgtgatccatgtgacaaaaaccgtgctgccttacataagaaagcatggcggcgcaaagattataaacgtgagcagcatcagcggactgacaggattcccagcgctgtcgccatatgtttcttccaagcatgcattggaaggtttttctgaaagcctgcgtatcgagctgcttccgttcggtatcgaaaccgctttgatcgagccgggctcatacaagacatcgatctggtcaacgtcattatcaaattttatgtcggtgcctgctgacgattcagcctatcatcaatactataaaaagatcctttcctatgttcaaaaaaacggagaagaaagcggagatccccaagaggttgccgacctcatttatcaattggcaacaaaacagcacataaagaatttgcgatacccgatcggaaagggcatcaagctcaccctgctgttccgatcgctttttccttggtctgcgtgggagtctatcctgaagaaaaagctattcagctgatctaaattataattattataatttagtattgatttttatttagtatatgatataattaagtcaacagatcacaaggaggacgttatcttatgaaaactgaaaacgcaaaaacaaatcaaacattagttgagaattcactgaacacacaattatcaaactggtttcttttatactctaagctccaccgtttccattggtatgtgaaagggcctcatttctttacattgcacgagaaatttgaagaactttatgaccatgcggctgaaacagtggataccatcgctgagcgcctgctggcgattggcggacagcctgttgccacagtgaaagaatacactgagcatgcatctatcacagacggcggaaacgaaacatcagcatcagaaatggtacaagcattggtaaacgactacaaacaaatcagcagcgaatctaaattcgtgatcggcctggctgaagaaaatcaagacaatgcgacagcggacttgtttgtcggattaattgaagaagttgaaaaacaagtgtggatgctttcctcttatttagggtaacaaaaaagctgaaccttaatcgggttcagctttttgttttttcttagcttgaactgctttctgtctgcttggtcagtgttgcgttcaacgttttcgtttttccctttcgcagcacttggattgttgttttatctccgacttttaagtctttgtaaaggatctgacggatatccgcactgctttccacgtctttaccgtttagtttgacaatgacatcctcagatttaatacctgctttttctgccggcgaatttgcttgaacttcttttacataaacacctttgcccaattgatctccaaacaggccgagcgtattttcctgataggtttcaggaacttgtgacatgtcaatcatctgcacgcctaaaaacggacggtccaccttcccgttttgcagcagctggtcaacaatcggctcgacatcattgcttgggatcgcaaatccaagtgattccacgccgctttcgctcaccttcaagctgttgatgccgatgacctggccgcttgcattgattaatgggcctccgctgttccccggattgatcgctgcatcagtttgcagcacgttcatttccaccgtcccttgtgttgtatccacatcaattgtccggttcaatccgctaatgatgccttgtgtcaccgtaccggaaaactgctgtccgagcgggttaccgatagcgattaccttttcgccagtgcgcagctgtgaagagtcaccaaagctcgccactttttttacattcttgccgctgatttccaaaactgccaaatcagtaatggtatcgctgccgacaagcttggcagtttccgtttctccgttgtatagcgtaacagtcagcttgttcgcgccttcaacgacatggttgtttgtaatgatatacgctttatcgctgtcttttttgaaaataacacctgacccggttccgctttcactttctgagctggagcctcctcccgtgccgaatgtgttattttgagaggtttggatatttgagattccgacaatcgtaggctctaaatcctctaccatatcagcgatgtttgatgcgttcgttatcggcgccgttgtaaaattatcagactgcacctgtttatttgcggaagcggattcggtcgcctgattttggtctgacggcagataaggcgcgatgccaagcatgaggcccccgccgataataccgcctaaaatcgggctcagccatgcggctctccgtttcttttcttttttcacagccgtttcttgcttttccatttctagtgcagaagccgtttcctgccgtcccgcttcatatgacacaggcgcgtcaagcaattcttgttcagaatgtccaatcagcttctggttttctgtattctgctgttctgtatgtgaaggttcagtttgatgttgatcgttttggccatcacgtcgataatccatgttcttacactcctttaacggttattcatttatcgttacatattcatcgcatgtacaagttcaattgtcccaataatgaggagaaaagcaaagcaccaaaatagaatatgtttgatcatcctacatcttcctcgctctttttctcttcctttcttcccttatacatatcataaacaaacattgtgggataaaaatgaaaagaatatgtgaaattatgaaaattgcctgccgtatgttaaaactagtttataatgacgttgaaaggatgtgaagagccttgtcatacaccatttatctagttgaagatgaggataacctgaatgaactgctgacgaagtatttagagaatgagggctggaacattacatcttttacgaaaggtgaagacgccagaaagaaaatgacaccgtctccccacctatggattctcgatatcatgctgccggataccgacggctatacattaataaaagaaatcaaggcgaaagatcctgacgtgccggtcatttttatttccgcccgagatgcggatattgacagagtgcttggcttagagcttggcagcaatgactacatttcaaagccgtttctgccgcgggagctgattatccgtgtgcaaaagctgctgcagctcgtatataaggaagctcctcctgtccaaaaaaatgaaattgccgtctcctcgtatcgggtcgctgaagacgcccgcgaggtctatgacgaaaacgggaatattatcaatttgacgtcaaaggaatttgatctgctgctattatttatccatcataaagggcatccatactctcgtgaggatatcctcctaaaagtgtggggacatgactacttcggaacagaccgggtcgttgatgatctcgtccggagactgcgcagaaagatgcctgaattgaaggtggagacgatttacggtttcggctacaggatgatgtcatcatgaaaaacaagccgctcgcgtttcagatatgggttgtcatatccggcatcctgttagcgatatcgattttactgcttgtgttattttcaaacacgctgcgagattttttcactaatgaaacgtatacgacgattgaaaatgagcagcatgtgctgacagagtaccgcctgccgggttcgattgaaaggcgctattacagcgaggaagcgacggcgccgacaactgtccgctccgtacagcacgtgctccttcctgaaaatgaagaggcttcttcagacaaggatttaagcattctgtcatcttcatttatccacaaggtgtacaagctggctgataagcaggaagctaagaagaaacgttacagcgccgacgtcaatggagagaaagtgttttttgtcattaaaaagggactttccgtcaatggacaatcagcgatgatgctctcttacgcgcttgattcttatcgggacgatttggcctataccttgttcaaacagcttctgtttattatagctgtcgtcattttattaagctggattccggctatttggcttgcaaagtatttatcaaggcctcttgtatcatttgaaaaacacgtcaaacggatttctgaacaggattgggatgacccagtaaaagtggatcggaaagatgaaatcggcaaattgggccataccatcgaagagatgcgccaaaagcttgtgcaaaaggatgaaacagaaagaactctattgcaaaatatctctcatgatttaaaaacgccggtcatggtcatcagaggctatacacaatcaattaaagacgggatttttcctaaaggagaccttgaaaacactgtagatgttattgaatgcgaagctcttaagctggagaaaaaaataaaggatttattatatttaacgaagctggattatttagcgaagcaaaaagtgcagcacgacatgttcagtattgtggaagtgacagaagaagtcatcgaacgattgaagtgggcgcggaaagaactatcgtgggaaattgatgtagaagaggatattttgatgccgggcgatccggagcaatggaacaaactcctcgaaaacattttggaaaatcaaatccgctatgctgagacaaaaatagaaatcagcatgaaacaagatgatcgaaatatcgtgatcaccattaaaaatgacggtccgcatattgaagatgagatgctctccagcctctatgagccttttaataaagggaagaaaggcgaattcggcattggtctaagcatcgtaaaacgaattttaactcttcataaggcatctatctcaattgaaaatgacaaaacgggtgtaacgtaccgcatagcagtgccaaaatagactgtagatgttttgcagtctatttttttatgtgaaagaatagccgttaaaatctctgtaatttgttttgagcggctgtttgcattgatgaacccattttttctctgacaaggtctgcttcggatatttgactttctccactttgattcctctgtttcgcaagcggctgatcatttcgtccaattctctcattctagattcaccctttcgcttgagctttgaccattcggtcatctcaatttataatataaataatacatgataaaaaaacaagttacaataaggttaattttataacagacggtgtgactatatggtcatatcctagcaggcctccgggctccgaaagggtggaaccattgaaggaaaaagaaaaactgattattgaaacagccttaaaactatttgcccaaaaaggatacaactcaacatcagtccaggaaatcgcaaaagaatgcaaaatatctaaaggcgctttttatatttattttccttcgaaagaagcgcttcttctctctatgctgaactactattatgataaaacgtttacccgaattttaaatattaaaacgaagggcgacagccccagaacggcttaccgtaaacagctgaccgtcctctatgaaaacattcttgaacacaaagattttatcagcatgcagttgaaggagggttctctgccttacacagaagaagtggagcaatgcgcaaaaaaaatccgccagtcctcacttcaatttcatatcgacagcctgctgaacatctatggaaaaaaagcggaaccctacactgctgagctttgttttttaatagagggcatcagccagatttacctggaatgcatgattttgctcgggtacactgtgaagccgtctcaattagctgatatcattatgaatcgaattgatgatatggtaaaaggcatgtctgaacgaaacgataagcctttcatcacattggaagaggcgagctctttattcgggcctcttacgcacggacggcctgacccgctgactgaatcaattgtgaaaagcctacgtgacaaaattaacagcttaaacacaaactcctctcttgaattatcggagagcttggacatacttgaagcagaaatgaagaaaaaaacaccgaagcttgcgatcataaaaggaatgattcataatctgacggagtctgaagctctcgccaaagatgcggaacagcttaaatatttattaaaacagcaacatatttagaagaacggctgcttaaaaagcagccgttctttcttcctattacgcctttggttttaccatgtcttccggcttaaccatttcgttaaattgctcctctgtcagcaattcaagcttcaaagctgcttctttgagcgtcaatccctctttatgggcaagcttggcgattttcgccgcgttttcataaccgatatgcgggttcagcgccgtaacaagcattaatgaatttgacaggttttcctgaatggtttctttattaggctcaataccgacagcacatttatcatggaatgaattcatgccgtcactgagcagctgcacagattgcaggaagttgtaaataataacaggcttaaacacgttcagttcaaagttcccctgacttgccgcaaagccgattgtcgcatcgttccccatgatttgcgctgcgatcattgttaacgcttcgctttgtgtcgggttgactttaccaggcataatagagcttcccggctcattttcaggaatgacgatctccccgatgccgcagcggggtccgcttgcgagccatctgacatcgttcgcgattttcattaagtcagccgcaagcgcttttaatgcgccatgcgcataagtgatttcgtcatggcttgtcagcgcgtggaatttattcggcgagctgctgaacgtttggccggtcagcttagtgatctcttctgagacaagctctccaaactctgggtgagcgttgatacccgttccgacagccgttccaccaattgcaagcgcacgcattttatctgtcgcttccaaaatcatttccttcgaacggtccagcatgtgaacccatccgctgatttcctgtccgagggtcagtggcgtagcatcctgaagatgcgtgcgtccgattttgacaatatcattgtatgcttttgctttttcatccagtgtattgcgaagctgatcaagcgccggcacaagctgctcgtaaacagccaaaacagcggcaacatgcatcgcagtcgggaatgtgtcgtttgagctttggcttcggttcacgtcatcatttggatgaatcgtttgatcagagttcttctcttttaataaagcagtcgcacggttggctaccacttcgttcatgttcatattgctttgtgtgccgcttccggtctgccatacgacaagcgggaagttgtcatcgtacttgcctttgagcacatcatcacaaaccgctgcaatcgcttctgctttttcagcgtccagattgccgaggcgtttattagctagagcagtgcttcgttttaaaattgcaaacgccttcacaacacgcatcggcattttttcagaaccgatcttaaagttctccttgcttcgctgtgtttgggcaccccaaaatttatcagcaggaacttttacttctcccatggtgtctcgttcaattctgtattccatttatgtatccctccataacggttgcttcaatagatcataattcgccaatgacacaaaaaatcctttttatttttcgatcttggcagattttaattttaattcaagatatacgcgggaatcctttgaatatttgtattttggatttgtcctgccgtactcctttgatgtataagagacatcataatgctgttcaaatgatctaatgagctgttcaatttcttcttgttttccagctagccttacctgtgccacttcgtatcctccgctttcataaaaaaacttactccatgaaatactctaacacagtatatcatttttttaacaggaaaagataacctctactaaggttttggataagaggtgacctcattggaacaaacagagtttaaggaatatatacacgataatttagcattggtgctgccaaaattaaaagaaaacgatgatctggtgaaaaacaaaaaaatgcttgcgaacggactggttttttactatctctatttcagtgaaatgactgatgagaataaggtgtcagaagccattaaaactttgattaaagatgaggagaccttaacgcttgaccaggtcaaaaaacgccttgaccagcttgacgcaagacctgttgaaactgcaaaaaaaacgattgaatcgattctcaacggcaattgtgctgtgtttatcaacggattggataaagcctatattctgaccacaggaaagaaaaaaacaagaagcctgacagagccgacaactgaaaaagtggttcgcggcccaaaagtagcgtttgtagaggatattgatacaaatctcgctctgatcagacaaagaacctctcatccgaaattgatcaccaaaaaaatcatgatcggcgaaaacaagctgaagcctgcagccattatgtacattgaaggcaaagcaaaaaagtccgtcataaaagaagtgaaggcgcggcttaaaaatatccagctggaagatatccaggacagcggaacgctcgaggagctcattgaagataataaatattcaccatttccgcagatacaaaatacggaaagacctgacaaagtatcttcagccctgtttaacggccgtgtggcaattttggtcgacagttcaccatttgtgctgctggtgccggtttctctcggcatcctgatgcaatccccggatgactactatgaacgctggatttcagcatctcttatccggtcgctgcgctttgcttctatctttatcaccttgtttttgtcatcgatttatatagcacttgtttccttccatcaggggctgctgccgaccgcactcgccgtcacgatttcggcgaacagggaaaacgtgccgttccctccgatatttgaagccctgctgatggaagtaaccatcgagctgctaagggaagccggactgcgactccccaatccgctcggacagacgatcggcctcgttgggggcgtagtcatcggacaggctgctgtagaagcgaatctcgtcagttcgattatggtcattgtcgtcagtgtcattgccctggcatcctttaccgttcctcaatacggaatgggtctgtctttccgggtgctgcgttttatttcgatgttttccgccgctattttagggctatacggcattattttatttatgcttgtcgtttatacgcacttaacgagacaaacgagctttgggtctccgtatttttcgccaaacggattctttagcctgaaaaatacggatgactccattatccgtctcccaattaaaaacaaaccaaaagaggtgaataatccaaatgagccaaaaacagactccactgaaacttaatacctttcaaggtatttctattgttgcaaatacaatgcttggggccggacttttaacattgccgcgagcgctgaccactaaggctaatacgcctgacggctggatcacgctgatattagaaggtttcatttttattttcttcatttatttaaacacgctcattcagaaaaaacatcaatacccttcactctttgaatatttgaaggaagggcttgggaaatggatcggcagcatcatcggccttttaatctgcggctatttcctcggcgtagccagcttcgagacacgggcaatggctgaaatggtgaagtttttcctgctggagagaaccccaattcaagtcattattttaacgtttatttgctgcggcatttatttaatggttgggggcttaagcgatgtgtcgcggctgtttcccttttatttaacggtaaccattattattttgctgattgtgttcgggatcagttttaaaatttttgatatcaataatttgcgtcctgttttaggcgaaggccttggacccattgcaaactcccttaccgtcgtttccatctcttttttaggaatggaagtgatgctgtttcttcctgaacatatgaagaaaaagaaatacacgttcagatatgcgtctctaggatttctgattccgattatcttatatatccttacgtatattatcgttgtcggagctttgaccgctcccgaggtgaaaacgctgatttggccgactatttctctctttcagtcctttgagcttaaaggcatatttattgaacggtttgaatcctttttactggtggtctggattatccagtttttcaccacatttgtcatttacggatactttgccgctaacgggctaaagaagacatttggattatcgactaaaacaagcatggtgattatcggcataacggtcttttatttttctctctggccggatgacgccaatcaagtcatgatgtatagcgattatcttggctatatttttgtctccctgtttctgcttccgttcattctctttttcattgtagctctcaagaggaggattacaacaaaatgaaaatccggattttatgtatgtttatatgcaccctattgctgtccggatgctgggacagtgagaatatcgaggaattaagcttagtgatcggagtagggctagacaagcctgacgatgaaaatttagagctgacacagcaaattctcgtgccgaaaataatcagcgccaaggagggctcttcatctgatccgacacagctttctatcacaaagggtaaaactgtccatcaaatgatgagaacctctgcattaaagcataagcctacgttttcacagcatttgcgtctcattctgctttccaaaagcgtgattgcggatcaaattggaatggacgccattattaaccagtttgtcagagacaacggaacaaggaggagttcctacgtctttatcaccaacggccgaactaaggatatatttaacatgaatgatgaaggcgaacccgcatccaacgtgatatatgatctgacagagaataataaggtgacgatcagaacgatggagccagttacattgggggagatctcagaacacttaacctctgacgattcattcctcatccctcatgtcggtaaggaaaacggcaagctcgcgataaacggagcctctatcataaaaaataaattatggcaccgggacctcaccccgattgaggttcaaaatatcagcttattttcaggcactgtcgagggaggcgtcattgacttgaagcgcgatggccatctcttttcttatgaagtatattcaagcaatcggaagatcaagacggcatacaaggacggaaagttcaaattcaccgtcacccgcaatattgaaggtcgtctatctgaggactggaatcccaatgaagactcgtttaaggattcatatattaaaagtattgaaaagacagtcgaaaaacgagtacacgaaacagtaacgtcatttattacagagaagctgcagaaagagatcaaagcggacgtaaccgggctgggaaacgaggtcagaattcattatcctcaaaagtggaaaaagatttcaagaaaatgggatgatgattatttcagcaatgcggaaatagactaccgggtcaatgtgattgtcagagacttcggaacgaaaggcgcaaacaaatagcagccgcctaattcacgagatgatttcggtgcgcgtacaccgccgcctgcgtccggtcactgacatccagctttgataaaatattcgtaatatgtgttttgactgttttaatcgtaataaacagttcctcgcctatttctttgtttgtctttccttctgcgatcaggcagagtatttcgagctcccgttttgtaagcgattcatgcgggagcgcgttttcacctgagtggcgcagcctggataatacttttcccgccacttttgactccagcttcggctctcccttgcttgcggcgcggatggcatcggcgatttctgccgcttttgaggttttcaacagatagctgagcgcgccagcttcaataaccgggtacactttgtcatcatcaatgaagctagtgagcacaataattttcgggtcggaaagctcccggcaaatttgctttgtagcttcaatgccatccatgccctccatgacaaggtccattaaaatgacatcaggcgacagttccacagcaagccgaacaccttcgctgccgtccgatgcttcgccgatgacttcaatatcgggctgcgcctccaaaaaagccgcgagccccattctgaccatttcatgatcatcaatcaataatactcgaatcacgttcgttctctcctttttcttccggaaaaatcgggaccttcacttcgatttgagtgccttttccttctactgaaatcacttcggcgacaccgccgatttcacttgcacgttctttcatagaattcaagccgtatgaggaggctttcacctggtccattttaaagccttttccattatcaatcaccttcagacggagctggctgttctttatgcccagaatcacggttacttttgacgcttttgaatgtctaaatacgtttgaaagggcctcctgcacgattctgaacaagtggtcttcaacacccttggatatcgctgtgtcctgtatatcccactcaatatcaatcggctgcttttttcggaactcgtccaaaagctccgtaaggccctccttcagcccttttccttcaagggtaacaggccgtaaatggagcagcagcgccctcatctcattttgggcttcgcctgccatatgctcgaccatcttgatccgcttgactgttttgtcatcagcatccttgacatgttccagcacggctgatgtcatcatcgatatggcaaagagctgctggctgaccgcatcatgaagatctctagccaatcgctggcgttcttctgagataaccgacttcttcatttgagcctgccattccgcacgttcattggaaagtttctgcagggatgcgacttgaagctccacgcgcttcgccatttcgttcagctgatcagcggccaggccgatttcatcatcaccgagcggaggtatccgataagcgaaattgccgttttcaaaggttaaaatggattcaattaatgtatcaatccttgtcttcaaccggttgccgtacatataccctgaggcgaaaccgactgtcacgctgatcagaagcaaaatcaggataaacggaattccgaaccagcttgatgacagcaaaacaagcggatcgagccgatagtaaaacatcataaaggaaatcaggcaggcaaaaaggagcaggctgattcccgttgtcatgcggatggcgcgccattggaggctggcaagcattttttttctcatacgtacttcacatccacatcaccgataaataaggaaacggacacttttacccggcgctttgactcgctgaaatcagttgacgcggcatataccttcgtgcttaatccgcttttcttcgagccgatcagattaatgtcacctataaaaacagctgagctgacagccacttcaaggtccgatggtacataaatatcaacgttaccaatgactccgctaatgacgattgtactttctccctcgggaatcattgctttagataaatcgattttgatatcaccgataaaaccagagacatttaaatcattcaggtcaaacggctgcttcatcatttgcagctcaccgataaaaaagctgcgcatgtcgggatgttttacatcttttggcggatcatgatgttcttttttattgagattgacctgtttctcattcggttcaaatatcggcttccctttgataagcctgtagccggcgtaaatcagaaatgcggcaaacgcatagccgaataaattaaaggtgatgctgaagaggtttttcaaaaatagaaacgcggcaaagatatacatgacggagccaagccaatcacgggaatattttttaaggaaatagccggcaatcagaaaaaagagcggccaaaacagcagatcgcctattccgataatttgcaaaaacatactgatgccgaataaagcaatgatcaatccgagaagctgtttttttgtcattcctggtgtccgcctcctttcttctgcctagtgctaccgtatcgctagatccccgctgtccgttttgatgtcgattggatgctggccgcttccttgcgtgcctgtgatgtgatgctgttctttatgtgctttatcagcaaatgaatacggcgaactgacgtcaccgcttgctgataaagcattgactgcaaagctgccgttttggggaaggcttacattagcatcaccgcttgtcagcgtgacagatacgggaccggttacctttttcaatacagcattaaaatctcctgaagtcattttcacatcaagagagcctgatacatgaaccagatttgcgtcccctgaagctaaatcaatgccggctgttttggagacggtatttgaaatggaaacatcccccgatgatgccttcactttcagatcttgaatgcggacgtccgtcacgctcgtatttccgctcgcagatactgcgttcagcccggaaagcgcaagatggtcattcccggccacagacacgtcaccgcttgaggttcgtactgccagatcacctttataatcatacggaagcctgacgataagagttgaacggttaaatccattcaaaaattgaaattctttttcctttacggtcagctccagttttcttctgttttcagtaacaaataactttcctgagtctcctgaaatgcctgccgatatgtcacttcgttcttccgctataatccggacatccttgctatccgactcaatgaccatgctgtcaatgtcccgcggcgatgcgctggctgaatcagcttctgtgccatttatgaaacccaggcctgcagcaaacacatcttttacgacaacagcgaaaaaaaccagaataccggcagtgatcaacagtttgccaagcatttttttcattcggtttcatccttctcattcattctattataaaggaaaagcttgcgaattgatacgtgcggaaggggaaggacttgaccgcaaatccttccccgttccgcttattcatttgccgcttgtgtctggtctgatttttgcagtgaaagtgtccgcattttttcaatctccgcttctacatcgtctgcgaattctttacgtgtaagttctgtgccggcttccgctgactttgaataattcgcgcggatttccatttcttcaatacgattttcaatacgcaaaaattcacgatacgcgctttcactgtcaattttgtcaaatgtggtattcatatgctctttagctttcgccgcatttgcccgcgcaatcagcgcctgttttttatcctttacgtcctgaagctttgtttcaagtgcagccagttgctctttcagatcggccagctgactgtttgcctgttcataggaagctttatgctcagccgcctttccttctaaatacttcatttcagtcagcgcctttttcgccagttcttcttcacctgcgtcaaatgcgagctgtgcctgatttttccgttttccagccacttcagcggcttcttcatattttttcttaaattgataggcaatggtgtgctgtttcacaattgtttgctttgcttttgcgatgtcgctttccatatcgcgtacatattgattcagcatcacctttggattctccattttatcaagtccttcatgaactgacgcaacaaacatatctctgattctttttaataccatacctaattcctcctaatatattgatattattttttcttcaaaaattcttcccattcatcatcaaagtgagattggtaggcagcagaagccggttcaggatcaaaagatgatacaccgttatcagctgatccgtttttcatcagcttccagccgtaatacaccatagcggccgccaatgcgattccgacgacaaacggaagtgagcagatgagcataatggctccgataccgcccacgatgattcccgtgatggtttttcccgcggcaaaccttttgactcctgcgtatgtcatcaagctcccgatggcgagcgggatgataaagccgaagcttcctcctccaaaaaagacggatatcccaaatacaattaataagaatccgcctatagttttcttgttgatcttcatgcagatcctcctttcgttttccttgtcttcatcttatacaagttagaagatatgcaaaacgaatcagagattgatttttatataagaccggagtcgtatctcggacaggacccatcggcacaaaaaaacgccatgcacgaggcatggcgttttaaaaccctttacagatgaacacttgcttccctttctttaatcaggtcggacctttctgctttggccagttttgtaaacagcaagattccgatacccgcaataatttcgacaatcccgccggcagcaatcactgttcctgagccgaaagcattagcggcatacccgcaaatgacagctccggcagggatcgaaatatttgagatcatatgtataacggcgtaaacctgcggctgatcctcactatccacagacgtctggataatcgtgtactcaggaacattaacagcactgactgcggcaccaaaggtaaaagcagcgaaaaagacgagcggcaaaaaggtattcatccctgtaataaagaaagcaaatccttcaataatgccggcagtgacgaataacaagccgtacctgtttaccttgactttcgccagcacaaaccctaataaaaacgcgcccgcggcggtggtggcctttaaaagcgagtatacgatcggctggccgtttaaatcttccgcaacgtatacggcagagagcgcttcccatggggcagccgcgaaattcataaagatacagtaaatggcgagcggatataaaatctggtgttttctgacgagcctaaagccgcgtttcagtcttccgatatatgtgcctctctgtgtaacaaccgcagactctgattgagattcaaccgcagtgtacttaataaaaagaacgagaaaacctgacaccaaatagagcacaagtgcgataagcatggtataagaaggactaataaatgtaagaaaagcgccgcataatgtgacagccccaagccggacaatttgagcggaggattgcagcacagcgtttgctttttgaatgccctgttcattgacgatttgaggaatcaaagcgatagaggcgggattgtaggcagctccagtagctgaatgcacaatcataagcgtcatgacaaaccacagcggagagaagcccgcaaaatgacatagagggataatcaaaacaatcgccgcccttgtcagatctgaaaagtacatccaaaatttcagcgtggtctgtttcataaaaggccccgtcacaggcgccagaacggcttccggcaaaaacgtgacagcaatcaataaagcagtgccgatcgcacctttgccgtcataaattaaaaaccataatattgaattaaatgcgaacatatcgccggatatcttgactattcttgagaaaaacagataattgaaatttctcttccagatgctatcactttcaattaaattcaccatccatcagagccccccgttgcctattttttacatctatttattacaatatctcatttttccatttttcagtcaataattcataaggttcattttttgtcgtaaaatgggaaattgacagagtgaaaaacaaaaaaagccggcatgtatttgaacacgccggcttccttttcactttttatgattcgctgctgtttcggtcccgaaacacaatggcacttctttcatattctacatcgccaataccgcttcttgcattcacaacccgtgcggcggcaaagaaataatcggacagacgattgagataacgcagcactgtttcatgaatctcctccgatttcatcagcgccaccactcttcgttctgccctccttgtaatggtgcgggcgatatggagaagcgaagcacctcttgatccgcctggaagaataaatttcttcagttccggcgcttctgctgtataggcatcaatgcgcgtttctaaaaaggaaacagattcttccgttagtttgtagtcttttctttctgtgacgattgccagatcgcctccgcagtcaaacagctcatgctggatggtcagcagctcggctgtcagatcttcaaagccgggctgcccggaaagctctgccaaagcaagcccgataaagctgttaagctcgtcaatcgtgccgtagctttcgacgcgtaggctgtccttgtccgttctgcccccgactaagcccgtttgtcccttatcgcctgtttttgtatatagtttcataccctgaatctcctttacagacttattcaaacaactcagcagcctcttttacacattcagctgtccctttctttatcaattgattcagccgctgttctatgttttcggattgctgagtttgagtcgcggcgatgagaatatcacctgtgcctcctccgtctcccagcactttcgtccgttctgcttcggcagccataagagctttgatgaagaattgatctgccgcatagccgtttatcaaaatccaaatcgaaaagccggtctgaacgcatatgaaaacggataactctctgtcttcatacgttcgatacacgaaacggtcaagtctttctgaagaagccatcgcacacgtctcctgcagttgaaaaccgctttctgaaagacaggccgtaagtccttctatcggatctggctgatctggcagccgtttatggatcagcgtcctgctccacgaaaaccctgcaccgataggcgtcgaggacaatgttcgaagcgggatttccgtttgcagaagaatgtcatcacgccccgcttggagcaatgcttcaaatgggatagactgccgcttcacgctatctttttcaggctgaatcacaatcatcggtttaggtgagctttgatgaaccaaggcggtgacatctgtatcgtacaccgcctttatgctttgttctgtaacagcatattccggtttttgcttaggcccggcggtaccgtttttcataaacatgagcccatcacagtacaggcttgcggtgttcagatcatgaaaaacgctgacagctgccaatccgctttctctcgtcaggcgtttgatcagatcaagcaggtctttttgataagccagatcgagaaaattagtcggctcgtccaaaaataaaatacgcggctgctgcgccaaagcttgtgccaaatacacccgctgctgttcccctccgcttagttcgcgaatcggcttttgcgcaaaatcggccactcctgtttgctccattgcttcctgtacaatggcttcacccttttcagtctgctgtctgaacagccccgtttggaatggatatctgccaaaggctacagtttcttcgacagtaaaggtgaaggcttgatccattttttgcggcaggacagccatgatttgcgccagttccttcggtttatagtccgccagcagttttccggccagataaaccctgcctttcttggccggcagcgtacctgtcagcaagtgcaaaagcgtggtttttccgcttccattagggccgagaattccaagaaattctcccttctccactgttaagctgacattgttgattaggcggctgtcgccgtatcctcccgacagcccttctgccttcatcataagcttctccccccgcgatgctgccgaattaaaataagagcgaacacaggcgctcccgccaaggacgtaatgatcccgatcggcagttcaatcggctcaatgatggttctggaaagcagatcggctaaaacaagaaaccctgccccaagcaaggcggacaacggcagtaaatgccgatggtccgttccccacaaaagccttgtgatatgcggaatcacaaggccgacaaagccaatcgtacccgatactgccacagcgcttcccgtcaaaagagatccggctattaaaatcatcatcttcctctgctgaacgctgactccaagaagctttgctttatcttctccatatgtcatcacgttcagttcccttccgtttataatcaataaaatggttcccaaaagaaaaaacgggagaaacaaaataacatagctccagcccctcattgagacgctgccaagcagccaatgcacaatcggaagcaggttgtctcctgtcaaggcgatgataagagaaataaatgcgcctaaaaaagagttggtgatgacaccggtcaaaatgagggtggaaacagacatcgaagcatgaacgaggcggctgaagaaaaggaccgccgccatcgtggccagtgccgcggctacactcaaaaccgggagtgtaaaccctccgatgacaggaaggtgcaaacctaagaacagagtcacaacagctccgactgaagcaccggatgacacacctagcgtatagggatcagcaagcggatttttcaacaatccttgaaaagcggcccctgcaatagaaagagccgcccccacaagggcggccagcacaactctcggcagtctgatattcatcataatattagtgtacatcggatcatcagaaccgatagagccgccgaaaccttgatgccaaaagacacgaaaaacagcgggaataggaatatgcaggctgccgcaagaaattcctaagatgatgctcacggctaaaaatgagaaaccaatgatatatgcggcataacgattattccttaaacgtatccgggtaaatgctttccgcaagttcttcgaccccttcgatcagacggggaccggaacgtgtcacaagatcagggtccacatcatatacacgatgatgtttcacagcattgatttcgctccagccatcgcgtttttccacagctttcgctttcacaccgtccgttgtaacaattgcatcaggattgagttttacgatcgcctcgtctgtcatttgcacccatcctgtctgatccgcagctgcgtttttagcatggatgacatttagcatttcattcataaacgtatcttttccggttgtataaatgtcaggatcaggagaaacctcgataaatacgcttttctcctcgtcttttgaaatggttttcgctttttcttgaatatcctttagatctgatttcatgcttttcacgagctgatcggcttttttctccgccccgccagcttctccgatcatttcgattgatttgtacacctcggagaatgattgtgcatcattgacagtcagcactgtaatgcccgcgtccttcagctgtttgatggcatccgctgatgctgacatggaagactcatgggccagaacgagatctggttttagagaaatgactttttcaacgtttacattcatatctccgactttctcaacctttttgacttcctttggataggtatcgtttgtggtgacaccgaccactttgtcaccaaggccgagtgcgtatgtaatttctgtgttgctcggcattaatgaaacaatcttttttggctcttttttgatggttacatcttggtttgacgcatcatcaatggtgacagggaacacttctgttttttgttttgcctttgaatccttctgatccgcaggattgccgcagcctgccagcataacagcagccaacagaagcgcagcccatatcccggctcgttttttcataatcttttcctcctaaacgaactaaaaaagcatctctacgacggtaaagatgctgtaaacaacacaaaaaagcctattgtttacacatcatctgtcctcgcagaattcgtgctgatcaaacaggcaggtatcctggctcttggcgcttggccaattacagtggcgggaccgcaccggcttttaccggtttcccttttaagccggctgttgttcacggaccggcacctatttgacattcgtatccgtttttcggagtaattatactatatgactgacaggcttgtatatgtgtcctgaatgacttttccccatattgtgtatggaagcaaaatcctcgtaaacactaaatttgatcttgtatacttaataccatcatctatcaaaaggaatgattcttatggatttacagctaaaagaaaaactcgtcttaatcaccggctcgacgtccggtatcgggaaagccgccgcaaaaagctttctgcaagagggtgcggcagtcattgtcaacggacgcaaacaggagactgtcgatcgcaccattgaagagctttctggctatggaacagtgcacggtgctgctgccgatttgtcaaaaacagatgaagcagcggcttttatcgaaaaagtaaatgaaatcggtgatatcgatatccttgtcaacaaccttggtttcttcgaggtaaaagacttcgccgatgtgacagatgaagagtggaatcaatatttcgaagtgaacgtgatgagcgccgttcggacaagccgtcacttccttccaaaaatgcttgccaaaaacagcggccgcattttaaatattgcaagtgaagcaggcgtcaaaccgctgccaacgatgattccatactcaatgacaaaaacggcactgatcagcctttcaagaggaatggctgaaatgacaaaaggcacaaatgtgacggtcaactcagtgctcccgggacctacttggacagagggcgtggcctcctatatggaaggcgccgcacaagcagccggacaggatacagatacatttatcaaagactatttcaaggtcaatgagccaacctcacttattcagcgatacgcgacagcagaagaagtcgccaacacaatcgtattcctcgcgtctgacgccgcatccgccattaacggcacggcacagcgtgtggaaggcggcattatccgttctctgtagtataaaaaacgcatccgttgtttcggatgcgttttttttatacgtctccagcaaatggtaccggctgatatccgcctgtttccagttgtgctgaaaacaaccctccagcgtgaggctgctcgtatctctctttttctgtcatttgttctgttgccgttgtaatgtaaagggtttttaagtctttgccgccgaacgcgcagcacgtgacatatttagccggcacgctgattgaattgatttcttttttctgaaacgggtcaatgtgaacaacgcggctgccgccaaacagcgccacccacagcatgccattttggtcaattgtcatgccgtccggcaatccgtccgactgatcaaaacgatagacaggttctggattcgaaacatccccgctttgaggatcatagctgtaacgtacaatctcctgggtcggcgtgtcgatgtaatacatcaaattccgctcgcggtcccaatccaaaccgtttgaggtggagacttgatccttgattttgacaagactgccgtctagattcaaacggtacagcgacgcctgtttttgctcgccttccatgctcgtcgtccccgcccaaagccttccgtacgggtcacatttagcatcattaaatctcaggctctcatgcatgtccttcggctgtttaattttttccaagctgtcatcccgaagatgatacaggtaaaacccgtccttcatcgtcataatcagttcatcctttgaatatttcgcaagcgccgtcacaaaggatttgaatttgattgatcggttgattttttcttcagggtcaaagatgtggagctcgctccccaggatatcaacccaatataagcggccgttttcttcatcccataacgggccttctccaatcactgcccgagtgtctgcttccaatactgcatccatgtgttacacctctttagcttcagtctatatattgttattcccggcaaagaggtgtccaaaccacttgatgtttattgttttttaaaaaggatggtaatgaccgttccaatgttcattctgctgttcacatggatcgttccgttatgcagatggacaagctccttggcaatcgcgagcccgagacccgttccggcagttgaatcttttgtgttcgtccctctgtagtaacggttaaacaaatgggtaatcgtttcttcatccattcctttcccattgtccttcacctttaaagatatatgattttttgtttgctccagaatgacttgaatctctgttcctttgtcgttgtgcttcacggcattcccaaggaggttttctaatatgcgcctgaaccacgcttcatcaagggcaaattcaatatgctcttctttggatacaaacgagatatcatagccttcagaaaacggatttttcttaaaatcctcaatgacatttttaaaaaacgggataaggctagtgagatttctctcaataggaagagcatcatttttcagccgatacgttaaatttaagtcttcaatcagcttagacatgtattcagatttttctctgacaacctgccccatttctttcacttcttccggcgaccagtcatactgcttcgactcgagcatcatgctgtagccgtaaatgctgctgagcggtgtttttaagtcatgtgacaaaccggcaatccattcttcccttgtcgcctggattttttctctgtttcttttatcccttctcagcgtttcagtcagctgatccattgattcaaatatctcaccgaagaagcggtacggctgtttgatttttccctttttatttttgctgacaggacggccttcccggtttctaggttcctcaagcttcccttttgacagattgaccagccatctaatcgtgtgaaaaatcggcagcccgaatcggaacatataccaaacggtcatccaaatgatatacatgaacaaaacggccatcacgagaaacatcgcttttaatacaaccttcaggaatgatttgttaaactcctgatcggttacatagactgggtttggcaccgtagcgaccatccatctgtctttattgaggatcttaacggaaatttcccgcttatagttccaaggcttagagctgtatttaagcagctccagctggttcatcgtttttctttcgctttttgtgctattgatgctgtcgagaatctttccattgctgtctaacaggtaaatggcgccttttttccgtttaatatagtcgatggtactagacttatagtgcgctagtgagtctatcttttgttcacgcttttcaacggaagtcaggagctgttcactttttgatttccagccggacaatagaagatacgacttatcttcaatattgatggcccaataattcagtttatagttatgaagctttttggttttataaatagacaaaagctctttcttggtataggtgcccggcacgtcttttggcacgccgtaggaataatcagtgtttccttccgaatcaatgatttgcatccagccgtgctgtttatcaacagatttcttcaggaaattatccacttcccatgtcccgtcttcgtttacatcgagatatgcctcaagtgtgtcggtcgttgctttcgtcagccctgaattggattccgcatcgctaaaacgggcgtctaaatagaaaaacgatgcaacaagcataaccgtaagcagcaggatcacaatcagcatctggccgaaaaagtgaaacaaaaacttccatcttaacctcatgaccgcttgccttcaggatttgggataaaacgatagccgagacctcgaacggttacaatatactccggattgctcggatcgcgctcaatcttctccctaagcttgcgaatatgaaccatgacggtgttgttgtcaccgtaggaaggatagccccatactttttcatatatttgatctttggaaagcaccacgttagggtgttcacaaaaatactgcaaaagctgcagaagctgggctgaacaggcaacggcttccccgcctacgatcaactcggcattttgcggagaaaaagtaaagtaatcatatgtgtaggtttgatttgaactcgtttctttcgattgatatgtacgcttgagatgcgctctgatccgcgccgctaattccagcggattaaatggttttgtgatatagtcatcagctccaaccgcaaagcccgataatttgtccgcgtcggatgatcttgccgtcaggaaaaaaatcggagcgtctgaatactctctgatcaatgtgcaggcttcaaaaccggacattccgcccatcatgacatccagcacaatcaagtcaaccttattggccttcacaacgggaatcgcttcttctgcgcttgccgcatccagtatatttcgataaccttctttttcgagaacgcgtttgatcatgtccacaatcgctttctcatcgtctacgattaaaattgacgcattttccacttttatgttcctttctgtcactgtttttttcatcttatcattatatcgtttatttatggtacatttttgaatacattggagcttggcaaatcaaaacagcaaaaaaggagcaaacaagcgctcccttttgatgttttttcatatgaaaatattatgagttctcatctaccatgtacaaaataaactcccaaaaccccggtacatcctgacataaaagcatatcagccttttcaaacattttgatcttcagctcttgctctaaatcttctctttcttgataggacgtattgctgagtttttttctgatcatcggtgaaaagcatgcaatcaggtgctcaatgtcataagtctcgtctttttgtttctttttttgttcaaactggccgtccacagcttacttttccccctttttttgcgccgctaactgctttctgatattctccagcccctttttatgaatgttggagatgttttgtcgggactcccctaatgaatctgcaatctcctgcatcgtggcaccgtgaagatagactttcgtcagcacacttttttgtttgtcagtcagcttctggatcgcttggtagagctggtaatcctgtacatgctggctcaaatcatcctgcctgtctaaaaattcttcaaatgcatcgctacctgtttcggaaggaagccgatctcccgcctccggatgatcaaccgtcagcggataccgtttttggtttttgcgaacccgcttatcaaaatcaatagaaaagatgcgaatcattgaattcatatacttgacgatgcggatttctttataaaattgcttaaatagctcgtccaatgatcttgcatctttttcgttagggctttccattacgtttttgaacaaacggtaatgctgaggattgctcaaaaaatgcttcacgatgggatgcttcattatctccttacattttgaccgtaaaagactttgatagtccatcaaaccgcctccctactaaattaaatgaaggaaagcaaaaaaaagtaaactactactttccgcctagtgtcttccaaaatactttgcagcagtttacgttttatcggttttcctcacttacatacatgactgcagaaaaagaagggaggtattttcctatggatcaggtttttatagaggaagtcgtaaaacagatcggcaatttggggtttcccgcgctgattgcaatgtatctgctgacccgattcgaaaagaagtttgatcaactaatagaactaatgacagaaatgaaagatcatgcaaaaaaataatttttcaatcgaagttgacttttcactggtttttttcacttaacaaaacagaagggaaaacgaaaggcctttcaccttctctttctgctatcacatttaaatgtaaggaggaaacatttcatgaaaaaacaaaatgacattccgcagccaattagaggagacaaaggagcaacggtaaaaatcccgcgcaatattgaaagagaccggcaaaaccctgatatgctcgttccgcctgaaaccgatcatggcaccgtcagcaatatgaagttttcgttctctgatactcataaccgattagaaaaaggcggatatgcccgtgaagtgacagtacgtgaattgccgatttcagaaaaccttgcatccgtaaatatgcggctgaagccaggcgccattcgcgagcttcactggcataaagaagcagaatgggcttatatgatttacggaagtgcaagagtcacaattgtagatgaaaaagggcgcagctttattgacgatgtaggtgaaggagacctttggtacttcccgtcaggcttgccgcactccatccaagcgctggatgagggagctgagttcctgctagtgtttgacgatggatcattctctgaaaacagcacgttccagctgacagattggctggcccacactccaaaagaagtcattgctgcgaacttcggcgtgacaaaagaagagatttccaatttgcctggcaaagaaaaatatatatttgaaaaccaacttcctggcagtttaaaagatgatattgtggaagggccgaatggcgaagtgccttatccatttacttaccgccttcttgaacaagagccgatcgaatctgagggaggaaaagtatacattgcagattcgacaaacttcaaagtgtctaaaaccatcgcatcagcgctcgtaacagtagaacccggcgccatgagagaactgcactggcacccgaatacccacgaatggcaatactacatctccggtaaagctagaatgaccgtttttgcatctgacggccatgccagaacgtttaattaccaagccggtgatgtcggatatgtaccatttgcaatgggtcattacgttgaaaacatcggggatgaaccgcttgtctttttagaaatcttcaaagacgaccattatgctgatgtatctttaaaccaatggcttgccatgcttcctgaaacatttgttcaagcgcaccttgacttgggcaaagactttactgatgtgctttcaaaagaaaagcacccagtagtgaaaaagaaatgcagtaaataaaagacttgcggcttgcagagagcactcgttctctgcaagccttcataaggagctgaaccagtgaaacatcaaaacccttcaaaacgcttattgcggctctccataaagtacttgctggccgcagcagcagtggtgttgacctattttgctgtcatctatatattgttttctttagcgggaacgagctaccgctcagcagctcatgtcctgctttttgccgtggtatttcttgttctcggattatgctttgaaccatttgaaaggctgatgatacatagctttacatttttcaagacaggaaaacgtctattcattctccttgccggcatcgtacagctgctatttttgtggatgactgctcatacaacagaccaattgatcagcgacatctggctgtccaccacagaagaaatgattgtcgcagccgtttttttgattttagacaaatgcaactcggctcttcccagctaaaaaaagaacgcattccaattggatgcgttctttttattcatagcgaagcgcgtctacaggctgaagcttcgaagccttgatagacggaagcaagccgaagataatgccgactgccattgaaaagatgagtgctccgacaacagctggaatggagacgataaaaggcatcggaaaaatgaccgtcagcagcttggcgatgccgaagcccgccagcacaccgagtattccgccaatgcttgtcagcacgacagcctcggttaaaaattgaaataaaatcacacgccgcttagcaccgagcgctttcttaattccgatttccctcgtgcgctccgttacggaaacgagcataatattcatgacgccgataccgcccaccaaaagtgaaatactggcgattccgccaagcagcaatgcaaatgactgattaaaggactccacttcctgcgcgatctcctgaagatccattacactgtactctgctttttccagctcagcttctgacagtccctgatttaaaagatctgcagccattacacccgcttcttggatatgctcagaagaatcagcctgcacggcaatctgtgttggcgcgtcaaacccttcaataagcggccacacttttttcggcacgtacaaaaccgggttcgcatagtcgccttcaaacatgctttcctgttgatttttttctttaaaaacaccgacgaccttaaacggcacaccattcatctcaatgtttttatgcagagcttctccgtctggaaacagttcatctctgacagcttcattgatcatcactacttggtgtgtgctgtttaaatcgttttccgtcagctttctcccttcggttattcggattggaaacatgtcgaagtaatcatcgtccactccatacacttggggatacgaaacgtttgttaaatgaaaaacgctcgcgccttctgacaagtaatataaggataatcctttgaccatcggatctgatttgatcgcctttactgtttcttccgctacaggcggcgcggacgcatacgacacctgagggccgccgctctcctcttctccgccagacggctggtagacaacgttgatcgcgttgtttcccatgccgatcatactttgctttaattgctcactttggcccttcagcattgaaacaatcgcgatgattgccgctatgccgataatcacgccgagcattgtcagaatcgatcttaatttatgagaaaaaatggattgaaaggagattcgaatatgttcaagcatggctgatatcccctctctcatctaataccagctctccgtctctgataaaaacggttctgtcagcttttttggcgacgtccgggtcgtgggttatcataataatggtcttgccttcccgatgcagttcagaaaacagtgacaaaatttgttcacttgatttggtatcaagcgccccggtcggttcatcagctaaaataaacctcggctgattgacaagggccctcgctatcgccacccgctgcttttggccgccggacagcttaggcggtttgtaggagaccctgtcttttaatccgaccttttccagcgcttcatatgcccgttgccttctctcttttttcttcactttattgtagatcatcggcagctcgacattttgcagcgcggtgagacgcggcagcaaatggaaagtttgaaacacaaacccgattgattcattgcgaatttcggctaaagccccgtctttccctttcaatatatcgatctggtcaagcgtataggttcctgaggttggcctgtccaaacagccgataatattcattagcgttgactttccagaaccggaaggccccataatagctaaaaactcccccgcctgaacagtcagattgatatgtttcaagattggaacttcttcttttcccagcttgtacgacttcgaaatattattcagtgtcagcattgactgtaacctgctttccttccttgaccgcgggatcaggatagatcacataatcttccggcgtcaggccgctcttaatttccaccatgtcattttcatcagtctctccgatttcaacaggctgcttaaccgctttgtgattctcatcagctttccatacgtacggttcgccgtcatcctgaatgaccatgtcggacggcagcttgatcgtgtccgcatcagcattatcactcatcacttcgatgttgacatgatagccgacttcaagacctttatggctgtctaataaaatggtgaaaggatagttagaggactggggattcatttcttcatcagcaaagctttctgattcttcaccctcgcctgctcccgctggaagcttgccgatcgaggtgacctttcctttccactcgccctcaccgcctgttttcagcgtgaccctgactttgctgccttttttgatcgtgtccattaacagctcattgatttggcttttgaccagatatttgcctgtcgaaacaatctggatatacgggcctgctgcctggtcgcctgttgcaccgtcagcgatatcctgattgacgctttgaacgattccgtcatgcttgcttgtaatgacattggaacctttgtttttcgtcaggccagccagttctttttgatgctgcttcagttcaagctggcttgttttcaaatcgaaattggcttggtcaagttcatcttgaagctgggttttctcttctttccctgcaactttcagcttcttttccgtttccgttattgatttttgcaaacggttgatttgcagatttgtcatttcaatttgcaaattggcttgctccacttcatcagaatgatcctcgccctcatactcaaaaagcttatcgccctttttaacctgatcgccttctttgacgtatgtttttttaatgctgcctttttctgaatctatgtatactttctgctgtttctcaggttcaacctttccagaaaacgtttggcctgattctgaatctcctcccatgtataccgcgaccgattcagcatagggctccgatgatacggcaacttggttcatgtgagtaaaaaagtaaaaaccgccagcgccgatcccagccaatacaagcacaccggcacatatcgcaccgccaataagccattttttcttcttggacacaacgatctcctctttctgtaaactatgtaatattttcgaaacattctaaccaatattatctattaattcaaaaagacttgcaatccttttattgaaatgacggaatcaaatagaaaaattgtattttccaagccgaataaaaaaaatcccggcttcaaaccgggattttttcatacagtaactagctctttttcatttttaatcaagtcatatgtcaagcatacaggtttatttgtacggggatcagtcacgatttcggcatcaatctgaaatacctgcttcaaaatgtctggtgtcatgacctccagagcagttccttccttgatgaccgtgccttttttgagcgcgatcatataatgagaaaaacgagctgcatggttaagatcatgaatgaccattaaaatcgtccgcccttgctctttgttgagtctgtcaagcagctgcagaatttcaagctgatgtgcaagatcaagatacgttgtaggttcatccagcagaagcagttccgtcccttgcgcaagcgccatggcaatccacacgcgttgacgctgtccgcctgacaatgcctcaatcggccgttcagcatattcagccatgcctgtttcttcaagcgcccatttgataatccgtcggtcttcgtcatttaatctgccgaatcctgattgatgcggaaacctgccgtacgacaccaattcgtgcactgttaggccgctcggcgcttcaggtgtctgtggaagaatcgccatatcttttgcaatgtcctttgtagacattttatgaatcgctttgccgtttaaatagacggcacctgcatgtgaacgcataattctggacattgtttttaaaatcgttgatttcccgcagccgttcgggccaattaaggtggtaattttccctttaggaatcgatatatttaaatcctctacaatcgccctgtcgccataaccgattccaagctgttccgttgataatgaattcatattcggccccctcctctaattcgctttcatcaataaataaataaagtaaggcgcacctagcacggaaatgacaagtccgaccggaatttctgatggtgccaatacatttctcgccagcgtatcagcaagcaaaaacaggaatgagccgatgaaggcggagaccggtatcagcgtctggtgacgtggaccggtcagccttctagccacatgcggcgcgatcaatccgagaaacgcaatgccccccgcagctgccacgcatgaagcggcaagagtaaccgctgccagaagaagaatccgtctttccttttcaacagcggtgcccagcccggtcgccaattggtctccgagctgcataatgttcaaatagcgtgccttatataaagtaaacagaagcaagatcacaatccaagggagaatcgcccagatcatattccagttcgccccccatattgagccggatatccaaaccgcggcttgcataaaatcatgagggtccatcttaagctgaaaaatcagcaacagggcattgaatccggcattcacccctatgccgactaaaatcagccgaatcggtgtcacgccttttttccatgccagaatataaatgagaaacgcagcgaggattgctcctgccaaagcactgaatggcagcataaatgttccgaaaaagctgagatctgaagctgacccttgaaaaaagtatataaaaagcactacagcaagtgaaccgccggcgttaattccgagaataccaggctcggcaagttcattttgagacacgctttgcaaaatggctccagctacggagatccctgctccaacaagcaaagaaaggatgatccgaggcagcctgaactcaaataagacaagttcatcacgcgccgttccttggccgaaaaagacctgaagcgttttaagcggtgcaattttgataacgcccaaattgagactgataaaaaagaccaccacgataagcaaaaaggtcacagccattacaataagcggtttgtttgtttttgttttcattacagccctctcctttcacgacgtgccaaataaaagaaaaagggaacgccgatcagagaagttagcgcaccgacaggcgtttcaaagggcgcatttacgagtctggccgctatgtcagcaaaaacaagcaaaacagcaccgagcaccgccgagcaaggaatgatccaccgataatccacaccgaccaaaaaacgggtaatatgcggaatgatcagcccgataaatgcaatggtgccggcaatggaaaccgcagctccggtcagaattactacaataagcatgcccaccagtttcactgctgatgtatattgtccaagccctttcgccagatcgtcaccgagacttaacactgtcacagatcgggcgataaaaaacgcgagcgttaaaccgacagcccctgcaataagcaaaagctggacccccgaccatttcacacccgctaccccgccagcgtaccaaaagctgatatcctgagcgacatcaaagcggattgcaatggcagttgaaatgccggtaaagaaataagtaactgccgtacccgccagagcaagctttacaggcgtaagtccgccccttgaaaacaagccgatgcccattaccgtcgatgcccccagccccgctcccgcaaaggaccatagcacaagccccattgcagaaagtccgggaaaaaaggcaaacgcaatcgaaaccgcaaacgcagagcctgatgtcacacccataatcgaaggctctgccaaagggtttctcgtcatcccctgcatgattgctcccgacactgccaacaatgcgcctacaagcgcggcagccgccgttctcggaagccgaagatcatgtataatttggtgagatgtctttgtcggctgataatgaaaaatggcgtcccatacagtgcgcaaatgaatatccgctgcaccgagggatatggataaaaatgcgccaaggcaaagcaggcatagacctgcaataaggacgatgaccgcgccatatgtccttgacgtccattggatttcttctgatgcagtccgtatatttttatgttgactcaactgccgtacttcctttctgttactgataatgattatcaattgctgtttcagtatatcacttttttcagctgatttaatagagtgttttgaacaaaaatgaaaatgcatttgcaaaaatatcgtgtcaaccggcacttgcagtggtataatcacagatgataatgattctctttttcatctattttttagaaagaaggtatgagatatgacccatatatacaagaaactcggagccgcgttttttgccctgttattgattgcagcgctggcagcctgcgggaataactcagaaagcaaaggttctgcctctgattcaaaaggcgcagaaacctttacatacaaggctgaaaacggaaatgtaaaaatcccgaagcatcctaaacgggtggttgtcatggcagacggctattacggctacttcaaaacactcggcatcaacgttgtcggtgcgcctgagaatgtatttaaaaacccttactacaaaggaaaaaccgacggcgttgaaaacatcggagacggcacttcggttgaaaaggtcattgatttgaaccctgacctgattatcgtctggacaacacagggcgctgatattaaaaagcttgaaaaaattgcgccgactgtcgcagtaaaatacgataagctcgacaacatcgaacagctgaaagaatttgcaaaaatgacgggaactgaagataaagctgaaaaatggctggccaagtgggataaaaaagttgcggccgctaaaacaaaaatcaaaaaagcggtcggtgacaaaaccatttccattatgcaaacgaacggaaaagacatttacgtattcggtaaagactttggaagaggcggaagcatcatttacaaagaccttggcctgcaggctacaaagctgacaaaagaaaaagccattgaccaggggccaggttatacaagtatttcattagagaagctccctgactttgccggggattacattttcgcgggcccatggcaatcaggcggtgatgatggcggcgtttttgaaagctccatttggaagaacctgaatgccgttaaaaatggccatgtctacaagatggatccgatcggtttctatttctctgacccgatttcattagaaggacaactgaagtttattacggaaagcttgactaaataaacaaaagagccgcctgcccgcggctcttttgcaaatttataaggaacagctcaatttgaatcatatcagatattttctttgagccattcatattaagctgcatcctcatcgcgatcagtttttttatgctggagagactgaaaaacgttttttgcatattcgattgtgccttaaagtttttctttcgatttcagctttcctgtcagctaggttaacgaacggattcttaacagaagaaattgtgattttataaaaaagacacctgagcaaatcaggtgtcttttcattatgcttgtttttctttctggaactttttactcacaaatgtataaacgattaagccgacaaagaataaaccgatgccgaggataaatgtcgttaaatctgctgtgcctgttacgataacaaacacggagtatgcacacgccagtatcgcgatcaatccgtctcttacacgggagcctttcagctggtcatacgtttcacctttgatgactaccttcaagctgtagattgcagataccagatacggaattaaatatgcgagtgtagccgctgtcgttaaaaatgtaaatgcgtcacttattgtccgggaaataaccgagaaaatgaagacctgtgacatgacgtttgtaataatgagtgcaatgaccggacttccctttttattcgtttttgcaaaaaatgccgggaaatctcctgctttagcggcttggtatggcacctcagagccaagcaaaatccagccgagcatcgttccgaataaacaaaggatagccaaaagcgccataatcacgcttcccgcgtttccaacaatcgcatagagtacatcaacaaatggtttttcagagccgacaagcttatcatgcggcagaacacccatcgtaattaaagtcacaataatatatatgctcaaggcaatcagcaagccggtaattgtcgcacgtttcacatcacgctgagagcgcgcacggccggacaggatcaccgcggattcaattccgacaaacgcccacagtgtagaaatcgcggcgttatgaacctggccgccaattccaatgcttgtgccgttttctccttgaaccgggaaataaaaatgaccgaataatgtcgtttgaaacacaaacaaaccggcaacgataaagaagacaaaacctaatactttagaaagcgttgtgacaaagtttaatttacttgcgccgttaatgctggcaacaagaatcgcgtgcgttccccataacaagatcgtacatacggcaaacgtcagtaattggccgagtgtcacctcttgcccgccgatcgaaaacatctcacgtttatcaaccaagatcgggaagaacgaagtcaagtaaccggcgagacttgtgatgatcgccacgttgctgatccagctcgccacccagtagccccacaccattgtgaaaccggcagcgttgccttttttcgggtcagaaaacagcgctcttgcataactttgcggtcccgctgtcagttcaggcttgcgaatggacaagtgtccgaacacaagtgcaatcatcagcacgccggcacctgtcaaaagccaggcggacgtagctccaaacggactcgcaattgaagcaagcgagctcggcaaggagaaaattcctgatccaaccatatttccaacgacaaacgccgttaataaccaaaaaccccatttttttgtctgttccattccagtacctccatgattctttgtacggaccagaccccgagatcatataaacgcaaaaaaagcctgaacaaaagtccatgcttaaagaaacacacacccttgatctccggatagccctccgcgaaaaagcacgcggcagtcctgcacttattcagatacagtcccagcatagagaaggatcggctttctccacacttcggcgctgatgccttttacacatgtttaacagcccctgtcagcctggcatgtgtgacttatcatccgcgcaacctctacctcactgagaaagagtgaggatttaattattcagttactcccagaaggttatcaaagaaaggatgatctgtcaaagggaacagatggaaaatacggatagagccaagccctatccgcatgtgattatcgattatttttctttttttgcacagcttcttgaagcggatcatcttttagagctgaaccagcatcttcaagagctccttggattacgtttttttctttttcggaacgttttcctttatctttattaaagaaacccattcgtatcacctcttttaaaaaataggtacatgtttaagatgcctcttttatgaaaaattatgcgggatattttttatcgtccaaagtcctgttgatcaaacatacattctcttgatatatttgtaattcagagattttttgcaaaagataaaaggagaagcggcaaatgacaggaaaaacacacatcatgggaggcatcgcttcttgtacggcagcggcttattattatggatttgatccagtgcttatggctgcgtcaggcgcggttggagcattaatacccgatatctgccacacacaaagcaaaatcgggagaaaatttcctattttatcgaaagtggtcagctccgtttttggccatcgtacatttacacacagcttgctgtttatgctcatcatgttttttatcacttctacatacattccagataaaaacatatcagccggcctgatgatcggaatggcaagccacttgattcttgacgcttggacggtaaacggaatcaaattattattcccttcaacgatccgcgttcggcttccattatatatgaagacaggcagtttttctgagcagctcgtgctagctggcctgacccttgcttcatgttactacttttatatgctgtttcatgggcgcatgttttaaacatgagtgctgagacttgtctgaaccggctgtttttagtaggttttacttaagaagcatttcatgcagatgatcaagaaaacgcgaggagtcatattgatgaaaggaaccttttttcacaatcagcggtttttatgtttttcgatcttatttatgtggatcaaaacgtatgtgatatataaactcggctttgatttgcaaatcgatactctgttggaggagctaatgctgctggtcaacccgctcagctttattcttcctttattcgggatcggcctgtttctaaaagaaaacaagcagcgggcctttttgctgatcgccaatttggttctgactgttatcttgatctctaatacgattttttacggcttttatatcgattttattaccatcccggttttatttcaggccagcaacatgagcgatatgggcagcagtgtaaaagaactgttccatcctctgtttatcgccctgtttgtggatttggtttttctgctgctgttcgccagaaaaaccaaacacccacagacaaaagccgctccccgcacgatcaaacggtactatgcagcttcctgcggcatgcttttatgcacactggcacttgcagaagtacagcagccgaagcttttggcacattcttttgaccgggaaatgctagtcaaaagcatcggtctgtttcagttccatatttacgatacaatttctcagactgttaatatcagcgcgaaagcttttgccgatgaagacagtataactgccattaaaaactacacagaggctgattacagcaagcctgatcaaagcaaattcggtcttgcaaaggggcgcaatgtcatctttgtaacacttgaatcgacccaaagctttgttctgaatgaaaaagtaaatggaaaagaaattaccccatttatgaatgatctcataaaaaaaagctattcctttgatcatttctatcagcaaacagaacaaggaaaaacatcagattcagaatttatcgtcgctaactcactgtatccttcccttagcggcgccgtctttttcacgaaaagcgaccatcaatttcatacgatgtataaatcgctgaaacagcacgattattattcagccgtctttcatgctaaccataaaacattttggaacagagatgtcatgtacgatacgtttggcattgaccgcttttttgatgttgatgattttcatgtcactcccgggacatcgacaagctggggcttaaaagacaaagaatttttagagcagtccgccgaaaagctgaaaagcctgccacagccgttctacagcagttttatcacgttaacgaatcattttccgtttgagattgatgaaaaggatcagctgatagatgaattcgattcaagcagtgatctgttaaaccgctatgtgaccacggttcgctatgaggatgaagcattgaggcattttatcaaaaaactgaaagacgaaggcttatacgaaaattcgatgatcgtatttatgggagatcattacggcatttctgaagcccataacgaggcaatggctgagtttttagggaaagacgaaatcacaccgtatgacaacgttcagctccagcgggtgccgtttatcatacatatcccgggaatcaccgatcaaaagccggaaaccatccctgatgccgggggacaggtcgacgtcaggccgacgctgatgcatttgctcggcgttgagacaaaaggcgatatccaattcggcaatgatttgctgtcgggcgaccgcaccccattcgccgttctgcgaaacggcagctttattacgaacgattatatatacacaaagaacacgtgctatagccaaaaaacaggtgaagtgctggaagatcaggatgcgtgcctcccttataaggagaaagcaaacgaagaactgtctttctctgataaaattttaaatggtgacctgctcaggttttccgaatgaaaaaaatccctctatcaagagggattttttacgtttccaatatcaccttgccagtcagcttcgtttcatagccgtttaattgagacaaattcgccttgtattcctcagaattcaaaatctccttcacggccttaagcagctgctcatgttttttcaaaacgacaatatcatattgttcgtcgatgagcgggataaaatcaacactgcccatatgtgccgcgtgctgtgccccgattcccgcgtcagcctgtccgcttgaaacttgtgaagcggcagcgtaatgatcggtcacgatatcgtcgtatccctttacatcagccggattcacaccaagcaagccaagctgttcatcaaggagcacccttgcgccagaacccttttccctgttgatgatccggatatcggctcttttcaagtctttccagccttgaatgtttttcggattccctttttgcacatacagtcctgctttccggagaacgacattgatgagacaaaacggttcacctgtcaagatccgtttcacataaggagcgttatactggcccgtttcagcatcgtacaaatggaggctgacaatgtcacacttgccttgatacatatcaatcaggctgtttaagcttcctttgtatttacggagcggcgtctcttgaatggcattctccaaatgcttgctgagaagatccatcgaaatgtcctgtccgctgatcatgacattcggtctgccgtccggctcagcctcctgcacctgtttcggtgcttctgttgcagcgatgggctgagacattctcatattcgttttatattgctttaaatcttcttcatccacacgcatctgccttccgacacgataagcaggcagcacgccttttttaatcaagtcataaacggtcagctttgataccttcagcagacctgcaacttcttctatcgtataggaagaggtttcattcatcatcatcactctcctattttattataccttttcgttgaatgtaaaaaaacccacataaaccaaacataatcagttataattagttatatctaatgataaggggtgcaatcatgtttaagaagtattctattttcatcgcagccttaaccgcttttctgcttgcagcaggctgttcttcaaaccagtcttcaacggacagcgagaaaaaagtaacgttaactatctcagctgccgccagcgcgcaggatgcacttgaggaaatccaaaaaaattatgaaaaagagcatcaaagtattaccatccaagataactatggctcatccggcgccttgcaaaaacagatttctcaaggagcaggagcagatctgttcttctcagctgctgaggataaatttaaaaagctggtggatgatggagatatcgcaaaaaaagacagcactgatttagtcggtaatgaaattgtgctggtcgtaccgaaaaacggagattcacctgtgacaagcttcagcaatctggctgaatcagaaaaaatcgctctcggcacgccggaatccgtaccggcaggagcttatgggaaagaatcactgacaaagctgtctctatgggacaaagtgaaggataaaattgtgtatggaaaagacgttcgccaagttctttcttatgttgaaactggcaatgtagacgcaggtattgtttataaaacagatgccctggtctcgaaaaaggtcaacattatcgacgaggcaaaagcagatacacacagcccaattatctatccgttaggaatcgtaaaagatacaaaacaccgtaaggaagcgaaggaattttacgaatacctgcaatctgatgaagcaatgaaagtatttgagaaatatggctttactgccaagtagcataagcgcttcagaatttttcacacccgttgtgctttcctttcaggtggcggcagttgccggaattgttgtcattattctcggaacacttgctggagcatggatgtcacgggcatcatttttcggaaaaacggcactcgaaacatgttttatgcttccgctcgttcttccgcctactgttgtcggttttattttgatcgtcattttcggaaagcacagcttcatcggacaagccatcgagtggattttccagcagcctgtcattttcacctggtgggccgctgtgatcgcctcggctgttgtagcctttccgcttatgtatcaatcagccaaaaccggatttgctgacattgatcccgatatacaaggtgcggcaatggtagacggcgctagcagatggaaagtgtttatccatatctccgtcccgcttgcctatccttcgttactgaccggaagcatcctcagccttgcgcgggcgctcggagaatttggcgcaacactcatgtttgcaggaaacatccccggtgttacgcaaacactgccgacggcgatatatgtcgcattggattccggcaacaatacccttgcttgggcgtgggtcgtctgtattgttgtcatttcctttttgatgctgtttttcattcaacagaaaaaaacgcactaaaaaaactccccataacagggagttttttgattaaaacagaagctcatcaggatttgggccgacacgctcatctttatttaatgcgtcaattttgtccatgtcttcttgagacaattcgaaatcaaaaatatcagcgttttcgatgatacggtgttctttaatggattttggaatggttacaacttcatgctgcagatcccagcgcaaaatcacttgagccacagatttattgtgtttttcagcaatctgtgtcagtacttcgttatccaaaagctgtccctgcatgagcggagaccacgcttccagctgaatgccttgcgctttgcagtaatctcttaattctttttgcgtcaagcgagggtgaaactcaacttggttcaccatcggtttgatttcagcatctttcaacagctcttctaaatgatgaacttggaagttgctgacgccgatcgcgcggattttgccgtctttgtacagcttttcaagcgcgcgccatgtatctttatatttatctttgccaggccagtggatcaaatataaatctaagtaatcaagctgcaatctttccagactcttttcaaaggcagcaagcgttgtttcgtagccttgatcttcattccacacttttgatgtgatgaagagctcttctcttgccacaccggattctttaatcccgatgccaacgccttcttcatttttgtagatcgctgctgtatcaatgctgcgatagccatttttaattgccgctttcactgattcagtcgcttcattaccattttctactttaaaaacacccagaccgaaccaaggcatttcaactccgttatgtaactttacagtatcttttaaacttgttggcacttgaacatccaccctttcactgaaatgtaagcgtctatattatctcacattcctctcagccgataccaataatacgcttaagaccctctttttgcttcttttttcacagcacaggcaaatccaaacactatttttttcctattttaacaatattgagattacaaatacattgagcagggtatgcgtgtagtgtaaccaaatgaaaacaaaggaggaaacaacttgaaacgtattcgtatcccaatgacacttgctcttggtgccgctttgacaattgcccctttgtcctttgcttccgctgaagaaaatcctgctccgaagatgtcgcagacaactgctgctggaacaactgccgctgatgtaggtttaaacgtcaatctggatgtacttggaattgccaaccagatcgctgatgccatcaaatccgcacagaacagggatgggtttgtgaaaaacctcatggagtcttccttctacgcatccggccaaaaatataatgtcatggtctttaatttaagccaggaatatgaagatcatttgaacggtgtgcaattttacggctcagccgtttacgacggcattacgtatggcatttgggtatttgaagatggaacctttacaaacaaaggcgatggcggctggatcaactgggccttcagaggctggttcgaccgggatggcagcactgtcgcatttcatcgcccttaatatagaaaaaagctggcgctctaacgccagcttttttgctgcatttattcgccgccttcaagcatggcggcttcgacatcattaatgtattggcgaagctcatgggagatgtcccgggaaatttctctttcctcgaaaagtgtttgaatttcatttctgatcgcctgtacagccttcagcttcacttccagcttctgattttcaaaatgggcgcttgatttcagctcatgatggctgtgctccagcctgaaaattaactgtttatagaatgtaatgacagataaaaacacttctttatgctcttccgtcttgtgtttttccagatattctatcgctgcttttgccgttttcactcttgttgcccgtatcaatcccgcttcatttaaaatcgacatctccggctttttatgttcaccgaagaaaatccaatacatcagcctcttgagccttgtttttgataatccgactttaaacgggttcgcatacaaaatttccaactcgttaaatcgttcttgcagcacatttgctgtttcttccgggatgtctccccgctccagcattttcatcagcgcctcttgctctgccttaaccccttgggcacggactttacgctcgtgctttttgatgcgattagacgatgtatattgctgaaaacgaagatttttcattttctcattgtattcagctatcaccgcaagcgaggccgttttgtttgtctcattcatgtcctctttaatcgtttgaagggctgttttgatcaatttgcgtctcgccgtcagcagcttcttgtttcgttcctcgtcctcttcttctttttcagtcagaatcggcagcacaacggtagcaatgacaagcgtgcataaaatgacgccggctgctaaaaagagaatcagatttctttccggaaacggcgtgccgtcctccaggaaatacggaatggaaaaagaacctgcaagcgttactgctccacgcacaccggaaatcgaaattaacagcgtcgaacgaagacccggtttatagatgttctgatctttattaaagaaccatttgccgttccagaagaacagcacccacaggaatctcaggagcattaacgtaaatgtgatgactaggatatagccgatcaccttcatgttgctgatggcagtgtcgttaaagataacagaaataacatcagggatttgcgtgccgagaataacgaagaccagaccgttcaaaataaataaaataatgttccacgtacttgaggagacaatttgcagcttgatcatcgttgattccagacgatcctgttcaaccgcatgggtaataccgccagccacaacagctaaaatgccggaaacgccgatttcttcagctgccaaataaatcacaaacggcgtcagaatttgaatcagcatatgcatcgtgacatcctgcatgccaaggcggcgcagaaataggcgaaaacgaataatcaaaaatgaaatgacaaccccgcacagcaagcctccgagagaaataaagacaaagctgacagccgcttgtgctaatgaaaatgcgccagtcactgccgctgcaatcgcaaacttaaaggccaccagacctgatgcgtcattcatcagcccctcaccttccagcaggcgaagaatcccttttggcattttcactcttcctgataatgcgctgacagcgacgacatcagtcggtgaaagaatggccgcaagtccaaaggccgctgccagcggaatagcaggaatcatccagtgaatcgtgtagccgcctacaatcacagtcgcaaatacaaggccgagtgcaagcaataaaatcggagcccttaaattccaaagctctgcccgcggtgtcctctttccatcattaaatagcagaggcgcgataaaaagaacaaaaaacaattcggtgtttaattcaaaatgaagtccctgtggaaatgaggcggcaagaatcccaagagccacttgaatcagcggcaccggaataaacggaataaaccggttcacgatattagaaatcgcaataatcgttaataatacgagcacaactaaaaatatgtccaaatgcatgacctccttcgtctgttgtgtgtcggcatgatgagccaaaaaatctgtttgtctaaaagcccttgagctagggtggccttgcatccgctatgtggttccgcaggagttctctccacacttgtcttcttttatagtaccctttttagggtattttttctcatgatatgctcacagtgaacttttttgcagcagagcaaattacagaaaaaagagacaggaagctactccctgtctctcgtctttctttctcaatcatgaaaattcgtaccgtcagttgttgctttgataatgcccgcgcggatgacaaagtcaccgaaatgctcgccttcctcacgttctttcgcatagcgggaaagaaggatgcgcagctcgcttaaaatgtctgcttcaccgatgttttcacggtacattttgcttaaacggcttccgtcaaacgcagcgccaagatacatattatatttgcccggcgcctttccgataaatccgatctcaccgagtgcatgacgtgcacagccgttcggacaccctgtcatgcgaatggtgatttcctgatcacgaaggccgttttcgtcaataatctcttcaatcttatctaacagggtcggcaaataacgttctgcttcggccattgccaatccgcaggtcggaagagcgacgcatgccatcgagctgcggcgaagtgctgaatagtgcttgccgtcagttagtccgtactgttcaattaaagcactgatttcttcttttttatcgcttgaaacgttcgcaatcattaagttctgattggctgtcagccggaactcacctgtatgaactttggcgatttcccgcaagccagtcatcagcttataatcatcgtaatccgttatacggccgccttcgacaaacagcgtgaaatgccatttatcctcgatgccttccacccagccatagcggtcgccgttatgatcgaaatgatacggcttcgcttcttccaggctccagccgagacggttttccaattcttcttttacgttttctaaaccgaggcggtcaactgtgtatttgaaccgcgcatttttacggacagaacggttgccgtaatcacgctgaatcgtaatcgttttttcagcaacgtcatacatttgctcaggccggcagaatccgatcaccttggctaattgcggatatgtcgcagtatcgccatgcgtcattcccataccgccgccgattgccacgttaaaaccgatcagcttgccatcctcgacaatcgcaatgaatccgagatcttgtgaaaagacgtcaatatcattagacggcggaacggcaataccgattttaaacttccgcggcagatagagcggtccgtacattggctcgacttcttcctccggcgtgccggcaactctttcctcatcaagccaaatttcatgatatgctctcgtccgcggcagcagatcatcacttaattttttagaccactcgtatacctctgagtggatttcagattgataagggtttgatgcacacatgacgttacggtttacgtctccgcaggctgcgatcgtatccaaaagtgctgagtggatcgtctgaatggttttcttcatgttccatttcagaatcccgtgcatttggaacgtttcacgtgtcgtcaattttaatgtgccgttcccgtatttctgggacaggtcatccatgacaagccattgttcaggcgtcgagacgcccccgggcatacgcacgcgcagcatgaactgatatgcgggctcaagcttctgcttttggcgttcatttcggaggtcgcggtcatcctgcaaataactgccgtggtgtttcatcaggcggttatcatcatccggaattcccgcactgattcgatcgagcatcacttctttcagcgtgccgcgcaaataatcactttcttttttaatgcgttcaacatcacttggagagccgtccggtgcttttagaattttggtcaccatgttgaaaaactcctttcaagtcaaatcaatatacatcacgctgatagcgtttttgctgctgcatatcggcaagataagcctccgcttcttcgcggctcatattgccttctttttcgataatttcaagcaatgtgttatggacgtcatgcgccatgtgcttttcatctccgcaaatgtaaacagccgctccttcttgaagccattcaaacaattctgcgctatgttcaagcatgcggtgctgcacatatactttttcttccgtatcacgtgagaacgccacatccatttttgtcagcacaccgtctttgagccaattctgccactctgtctggtaaaggaaatccgtgacaaagtgctgatcgccaaagaacatccatgcctttccttccgctcccgtctcctcacgctcctgcataaaggaacggaaaggtgcgacgcctgtcccagggcccaccatgataatcggtgtttcagggtctttcggaagcttaaagttttgattgtgctgtacataaaccggcagtgtgtctcccggctgcagacgttccgcgcacaaaatcgagcagacgccttttcgttcacggccgtgcgcatcgtagcggactgcgccgattgttaaatgcacttcatccggatttgcggataaactgcttgcaatcgaataaaggcgggcaggcatttttcgcaaaatcgagacaaactcctgcgcagatacactaaatgggccatagtcacggacgagatcaagcaaatcgcgcccttcaatataggcttttacattctcctcatttcccggggctaaaagctctctaagctcatcgttccctgtcagctgggctgcctgttcaagaagcggttttgtgagaacggtaatctcatagtgagaaatcagcgcttctttcagcggacggacatcaccttgcttattaagcgtcacaatttcttccgggtcccaattcatttccttaaggagcagctcgacaagttccggatcgttttctggatagacgccgaggctgtcaccaggctcgtaagtcaggcctgatccttcaagagacagctccacatggcgtgtttctttatttgatcctctgccgtttaaatttaaattttctaacacttcagcccgaaacgggtttgttctggaatacgaagactcaccggtttgtgacgcagccgccggcgcaggcgcggcggttccgcccccagcttcatttaatcccttcaatacaccctcaagccattcggctgccggttcatcatagtcaagatcgcaatcaacgcgcggagaaatccgttttccgccgagttcttctaagcgctgatcaaattctttccctgtctggcagaaaaattcgtacgaactgtcaccaagcgccaaaacggaaaagcgcaggtcttcaagcttaggcgcccgtcttccgtgcagaaattcatgaaacgacagcgcgttatcaggcggctcgccttctccatgcgtactgacgacgattaaaagattggttaccttcttcagctgattcggcttaaaatcgctcatggatgagacggtcacttgaaaaccgctctgttcaagctgcttgccggcattttccgcaagcccctgtgcgtttcccgtctgtgaaccataaagaacggtcacttcttttgaaacggccggtgcttccgcagacacagctgccgccggcgcacccgcagtttcttgggcggaaacagattgcgcggataagtatccgctcagccagattttctgggattcggtcaaggtcggcagaaggcggttaaggagctctgcctgctcctgattaaacggactgttcattacctgaagttgcaacgtatccacctcacaaagttataaactgatcgaaaattgcatctaattgaactttaccggaatactaggcttaagtaaaatatatttacatgatgataactattaagaatcctaatgataaaacggctatgcttcatgtaaatagaaaaaagagaaggactcccttctcttcattcagccatctgatataagtgaggcggcacagcggttacaaacggactggcttcacctgtataaaatactgccagcatgtgcatcgcacgggtgcacgcagtatataaaagcctgcggtcgtgctctgtatgatagtgttcttcagatgcatcatagacaagcactgcgtcaaattcaattcccttcgctaaatacaccggaatcacgcaaacacccttttgaaatggttgattttctttatgaatcaggcgaacatctgtatattcactcatgtgggcgtgcgcctgtatgcattgctgcgcagtcttgcagatgacggctattgtttcgcgcccttttttcttgagccggccaatttcttgcgcgagcttttggcaaaggctctcatgtccttcagttttgacaacgagcggcatttccccgcttctattaaacggctcaatatccgctccatattgaagcatcgctttggtaaactcgacaatctgccttgttgatctgtatgttctctttaaacgaacatactcagcaggctcatcctcaaagcacgcatccatacgctgatccccgtgtatggtatgcgcgtagatggactgattgatatcaccgagcactgtcatgctggcagccggaaaaatgcttctcatgtaaaccatctgaaacggtgaatagtcctgagcttcgtcaataaatagatgtttgatcttcgtatttttctttctgccctcaatcagatcctgcatataaagaaacggtgctgcgtcctcatagagcaatttattatccgtaaatgccgaactggtcagctcacctatcgcgtccatcttctcatgctgaaattttcctccccagccagaaaacaattgcaaataaagttgtgtaacatcaagaaatgcaaggagtctgaccgcctgtttgagcggtttgaaagcttttttcacaatgatggcggcaagcagctgctgctctctttgataatcgttaaacgtactctcgctgaaccgtttcctttcttgcagttttctgtacacgtccaagtagtcctctttgtcaagcagctcagcttcatgaacaacccaatcctttcgccgttcctttttctcaagcttgttaagctcactcagcagccacttcgcggtttgctccatccgattcggaatggagtgattttgatccaatgagtaaaaataggattgaatttgctcctttgtgatcagcttttgtccgcggaatataatatttttaaaaatcatcccttcagaggaaagccgtgtgacgtattcattaatgaattgctgaaaggataaacccgccttccatgtgattcccgcaagccttgttggaaaatcgccttccttagtttcggtcaggcaatattcgagctgatcaaaggcgctttcacatttgaacttgcggccaagacgatgctcgatatattcctgaaacgtcgcctgctccatattctcttctcctaactcaggcaaaacagaggatacatagctgttaaataagaagttgggagaaaacaaaacgatttgtccggcatcaatgacgccgcggtgcctgtataacaaataagcgacacgctgaagcgcagccgatgttttcccgctgccagccgctccctgcacgatcaggatcttgcttttttcattacggataatctgattttgttctttctgaatcgtagacacgatgtttttcatttgggtatcggagtgatggcttaatacctcttgcagcatttcatcgccaatcgtcatatcggtattaaacatcgccttgagagtgccgtttttgatcataaactggcgtttcagcaccatttccccttctatcgtttcaccgggcacctcgtactccgcttttcctggagaataattgtagtacaaacttgatatcggcgccctccagtcatagatcagaaagtgttcctctttctcatccaaacaggaagctaaaccgatataaattcgctctgcctccgcctcgccgttttcaataaaatcaatccggccgaaataaggcgattttttcaattgatgaattcgtttgagctgctgatccatgcgccgatgattctgttcccgatcagacagcagctctgcctgctgcttaatgcttgccatcgtttcaatcgcttcatgggcatcatcaaaattaaccttaacatcctcccaaaagctttttcttaatccgatgatatcatgcttcaacccgcccgcagacgtttccagaaaccgctcttttttttcgagctccttcagcacctcatctattctcgactgctcttccttccattccttatcctgctgattcatgaacggcacctccagaaaatagttgacaaacatagatgaaatactgtaaaatataattggatacatatattaaatatatgatgtaaactggcaaatacaatttataatagcacattcacccaataccaatcaaggtttgggttatttatatgcagaaaaaaccgatttcaactcgaaatcggttttttctcttatgatttcacattgatcactgttggacgtgcttttcttaggttgcgaatcttctctttcatcagtatcgattccttattcctttcaatcttcgatataatatatctttttcattttaaaaacaccgcagagctttaccgtatttgtctgttcatctaacgtgaagaatgactaaactggctgttattgtcatcttccataaagcaactacatctctgctatcgtatctatagtcgcagtaaaatagtcatttttcacccattttcgacacatttcaacaaattaaagtttttcatttgggagaataggacgatgttacattatttctctcggtttatgatatgaacatgaagaaagaaccagaattagttaggaggaaatactcagtgaagaaaaagctatctatgttgttgctggcattcgtcgtagccgtaacaagttttacgtcaattgacctagtaaacaacaaagcggaagctaaagattgggttaaaaaaggtcaaatatggagtactcattaccattcgggctcatttaaaaactatacttactcgccaacttttcatatttattatccaggacgaggaacttgggccaacatgacatcaaatggatcaggcagcgggaaaattacagcaactctgcaacaaaagacaaataaaggctggaaaaatgttaaaactttttacgcaacgaaaaaaggctctacaaatttaagttacaaacaagcttctaaaagctacaaaacaaaatacagattcaaattcactaacacaggaactaaaaaaaccatcagctataccttttgggctacctattaatttcaaatagctttgctctgcgcggtcagcattcgaaaaggactttttatttgatcccggcaggctaccataaaagaaacctctccgtcatggagaggtttcttttattttactgactatctaagcgaaaagaacggtttggcagcttccaattaaacatataggaacaaacccggcaaacaacgagcacgaaaaacagaacgtataagccgaacgagttccccatccagcccaagccgacgattaaaccgccgagagccgcccagactgcataaatttctgccttcagcacaagcggtttgcgaccggcaagaaggtcgcggatgattccgcccccgcttcccgtcagcaccgcagccacgatcacggcactaagcggatggcccattttgacagcatacagtgcgccttggatagcaaaggcagcgaggccgatcgcatctgataaattgccccacttattccaatgcttcagcagcagcttcggaaacagaaacacaattgtaatagataaaagcgcgatttgaaagtacgctccctgctcccatagcgctgacaccggaacaccgatcagcaaattgcggatcgctcctcctccaaaagctgtgacaatccctaatatataaactcctaaaatatcatattcctcttccatcgcaacaattgcgccgctgactgcaaacgcaatgatgccaatcacactaagcagctcccaagccattctgatgactcccttttatgtttgttaaattttctgacgacctctagattttataatcgctccagcgtaaaatcaataacatttttatgagaaaaaaagataaatttagagggaatacggctattgctgatggacatgagtttgcgaaattaaaaaagcgcccggcatacgcgggcgctttttttgttattcagatttttcgcctttcagcaggcacataaaaatgataatcaggataaaagcaatcagggccaggaatggaatcgtaataaaaccaaaccagttaatatattggcccgagcacggcacgccgcttacacacggcttaatgccgctaaaaccgggcactttttgttctaagtaatgcatggttgaaatgaatgcccctataatcgccatcgggagcacatattttttcactcgtgtgtccccttgaaaggtggcgatgcctaaaatcagaacgagcggatacatgaggatacgctggtaccagcacagttcacatggaataaactttctgatttcactgaaatacaggctgcccagcatagcgataagagccacaacccaggaagcatataaaaatacgattctatttttcatatcgttacttccctttcagctctttttctattgtctctttgatttcatcataatccgcaaaatttttgatcactttatcattgacgtaaattgtcggtgttgcctgtatgttcattttttgattaaggtcagaatccttttccacttgagaagcgaatgtttccttatcaagattttccttgagcgtctcaggttttatctttgtggtgctttttgcaagatcaccaaggaggcctggggttacccattcctgttccgtatccggctgtttttcgaacagcttttcatggaaatcccagaaagagtcagggtcttccttccatacttcttcagatgcaagagccgctaatcttgaaccttttccatggaacatgacgttcacgaaagaaaatttcacatcgcccttatcaataaagtctttttgtatttttggaaagatgtcactgttaaacaccttgcaagacggacatttgtaatctccgaattctactacagttaccggtgcatcgtccttgccaagcacaggctgccctttgatagacggctgtccggaaaccgcatcattgccttgttccgttttgttattaatgatgacaatggctgctagcaatacaacaaccacaaccgtaaggatgaccgcgaatttcgcagaagactgctgtttctttttcactccgacacctcatcgttttaaaattaaaaaagaagcggatcgcaattgatccacttctttattttaacaagacaagcgccgataagaaaaccccgaaaaaatgaattctctccgacaatttatttgtttttgagacgcatgacgcgcatagcgtttgccacagcgagcagtgtaacaccgacatctgagaaaaccgcttcccacatggttgcaattccaaatgctccaagaatgagaaagatcgctttcacacctaaagcaaagccgatgttttgccacacgattcgccgtgtccgtttcgcaatccgaatcgcttctgctatttttgacggctgatctgtcatcagcacgatgtctgcggcttctaccgcggcgtctgacccaaggcctcccatcgcaacccctatatctgcgcgtgcaagcaccggcgtatcattgatgccgtcaccgacaaaaatgagtttttcactaggcaaaagcttagcttctaatgcttcgacctgcgccactttatcttgcggcagcagctctgcatatacctcaccaatcccaagctgttttccgacggcttctcccgtttgtttcgaatcacccgtcagcatagctgtctgtttgatcccaagcgactttagatcagcaaccgcctgtgctgcgtcttcctttacttcatccgctatgatgattgctccggcatagcgttgatcaacagcaacgtgtacgattgttccagcattttcatccgggacatcctcaatttgttctctttccatgagctttttattcccggcaaggatctcagttccatttacctttgcaaaaatgccgtggccggggatttcttcgtatgactctatctcatcggaggaaagcattttcccgtaagctttacgcacagattcagcaatcggatgctgtgaatgaagctcagcgtatgccgccgcttcaagtaatctatcctttgtaaaaccttccgcgggtttgatttctgtcacttcaaagctgccttttgttagtgttcccgttttatcaaacaccgcgtatttgacttgattcaaagcttctaaataattgcttccctttacaagcactccggcctttgaggccgctccgattccgccgaagaaaccgagcggaatggagacaacaagcgcacaaggacaagaaatcactaaaaagataagcgcgcggtacacccaatcggaaagcgcggcgccagaaagaacaagcggcggaacaaaggccagcaataccgcgatgatcacaacagcaggtgtataatacttggcaaacttcgtgataaagttttctgtccgggctttacggctgctcgcattctgaaccaagtctaatatttttgatactgctgattcttgatagccctttgtgacttcaatatgcagaacgccgttttgattgataaagcctgacattacatcttgtcctaccgcagcttttctcggaacggactcacctgttaaagcagatgtatcaaccatcgctgacccttgcacgaccttaccgtccaggggtatgctttctcccggattaaccacaatgatgtctcctgtctgaacgtcctccggggaaacctgttcgatgctgttctttgttttgagattggcgtaatcaggccgtatgtccattaacacactaattgattttctggaacggctgaccgcggcaccttgaaaaagctcaccgatttgataaaacagcataacggcgacgccctcagggtattgctgaatcagaaaggcgccgattgtggcaagagccattaagaaatgctcatcaaacacctgaccgcggatgatgtttttgactgcgcggatcataatgtcaccgccgatgatcaaataagcagcgaggaaaaggaaaagttcaatggttcccgaatgaaccaaatatgccgctgcgccgagaatgacagccgccgccattctgatcagcatattgaccattctattacgatagccatcatcagctgatttctttttatgcttttggcgaaccgttacatgcggatcaattgatttcacttttttctctactttattcgtgacccattgctcttctttcccatcggctgagacagttaaggtgcttgccgcaaaatttaccgcgcatccgtcaatgccttttatgcctttgactccattttcgattttttgggcacaattgctgcaatccaaaccgtccagaacgtattcctgtttcactagtctcaccttaccttccgatttagggttcccacttcaaagcgtatcaatgagtattgcattctttataatatatatgagcatatactcatataatagttacacctattatatgttgttttccaagaaagtgtcaatgaaaaacaaaaaccggcatatagccggtttttcattttactttttgcagacgaagagcattcagaacaacggaaacggagctgaatgccattgctgctcctgctatccacggtgctaaaaatccaagtgctgcgattgggatgccgaggctgttatagccaagcgcccagaataagttttgtttaatgtttttcattgtcaatctgctcatgcggattgcgtcggcaatgctgttcagatcgccgcgaataagtgtaatgtctgctgtttccatggcaatgtccgttccagttccaatcgccatgccgatgtcagctgtggcaagcgccggcgcatcgttaattccgtcgcctaccattgccgtctggcggccttctttttgtaggcgggcgatttctgctgccttttgttcaggaaggacttccgcaatgatattcgtaattcccgcttccttcgcaatggcttctgcagttctgcgattgtctcctgtcatcatgatgacatcaaggcccaattctttcagacgggcaacagccttccgcgacgtgtccttaatcgtatctgcaaccgctactagcccagctgcttctccatcaatggatacaagcataactgtttttccttctgcctctagctcttccattttggcgagaagagccccatgctcaacctgtttgctctccattaattttcttgtgccgacgaggatgctttttcctccagcttcagccaaaatgcctgcgccgacttttgcttcaaagcgggtaagcttcggtatctcaagccctttatctttcacgccagcaataatcgcttcgccaagcggatgctctgatcccgtttccgctgccgctgcaaattgaagcaaatctttttcttcaaaatggccgaatggaatggcatctgtcagacgcggcttcccgtttgtcacggttccggttttatcaagaacaattgtatcgagacgatgtgttttttctaaatgctcgccgcctttaaataaaatcccgaattcagcagcgcgtccagatccagccattatgctcgtcggagtggcaagaccgagggcgcaaggacaggcaatgacaagaaccgcaatgaacttgctgatcgcttcggcaaaatcgccaggagccgcccaaagataccaaatgagaaaagtgagaacggcaatccccaatacaatgggaacaaaaatacctgaaatctggtcagcgagacgctggatcggcgcttttgacccttgtgcttcctcaacaattttgatgatatgagaaagcgcagtatcctttccgacgttgacagctttaattttcagaaagccgtttgcgttaacggttgaacctgtcacgctgtcaccaggatttttgtcaacaggaagactttctcctgtaatcatcgattcgtcaaccgctgagcggccttcaaccacttctccgtcgacaggaattcgttcgccaggtttgacgtaaacaatgtcattaacaagcacttcgtcgatcgggatgatttgctcctgtccgtctcttacaacagtagctgttttcgcttgaagcttcatcagctttttaatcgcatccgaggaacggccttttgcttttgtttcaaacaacttgcctaataaaatcagcgtcagcaaaatcgcgcttgtttcatagtaaaggccgtctgtatgcccgtgagagccaaggctttgaaaagtaagataaagactataagcgtaagcagccgtcgtaccgagggcgaccaatacatccatattggcgcttttatttctgagcgccttatatgcacccacataaaacggccagccgatcagaaattggactggtgtcgccagcgcaaattgcatccacggattgagaaatatatccggtacccaaatgaatgatgtaaatgtaaaatggctcaccatcgcccaaagcaatggaaatgacaggacagctgaaaaaatcagtctcgccgtttgcttcctttcttctttctttttagcagcagcagcctcactgtcctgttcacccttcaactttagcttatatccaagcttatttaccgcttctttcaaatcgctgacagacgcttctttcggattgtattcgaccgtaactgtttctaaagcgaagtttactggagcatttgcgacgccttctattttgttaagccgtttttcaatccgattggagcaagccgcacaggtcatgccttcaatatcgaattcagctttttctgtaacgacgtgatagcccagcttttctattttttcttgaatcgctgcagtccctgtttcagcaggatcgtagattacatttgatgtttccgtcgccagattaacatttgcatccgtgacaccgggcatccgcttcagtcctttttcaattctggcagcacatgccgcacaggtcataccagagacctgcatcgcgatttccttttgttcactcaacatactcactcctttatatacacctggggggtatataaaaatgaaagaaatatcgcgcctccctataggcgcgataccttgaatcactcagctacgtcatagccctgatcttctatcgcatccgcaatatctttgactgatactttgtcagcatcaaacgaaacatcgactttacccgcttccagattgacatgaacggcactgacgccgtccagttctcctacgcttgtttctactgctttgacgcagtgctgacaagacattccttcaacttgcaatgttttttgttccataatcaattcctcctgtttattctttctattttcatcctaccatacccctgtagggtattacaataaaaaaacgctttatgattttgtgaactttttaaatacgtccaaaagctcagaaatggcctgttccccgtctccgcttttgatggcatctgctacacaatgatgggcatgatcctcaagcaaatgaagcgccacatttttcattgccgcctgaacagctgaaatttgcacaagaatatctacacaatatctgtcgttttccaccatgttttgaatgcctctgacctggccctcaatccgcttaagccggtttgtaatctgatccttttctttcgagcttttatggtttaatgttttatgttcgttatgcttttccatgcgtacacctctgtttaatgatattaattcccattatactgattgtccaaacggttgtctaagcatgccgatccaaaaaatgaatcagttaggttttaccatttgatcaggagggtatatacttctgttgataacgcttttaaaggggagaagaaaagtggacacgatcaaggttggaatattaggatacggattgtccggttctgtttttcacgggccgctgctggatgttctggatgaatatcaaatcagcaaaatcatgacatctcggacagaagaagtgaaacgggactttccagatgctgaggttgtacatgagcttgaggaaatcacaaatgaccctgccattgagcttgtcattgtcaccaccccgagcggccttcattacgagcatgctatggcatgcatacaggccggaaaacatgttgtgatggaaaaaccaatgacagcaacggccgaagagggggaaacattaaaaagggctgccgatgaaaaaggcgtattattaagcgtatatcataaccgacgctgggataacgactttttaacgattaaaaagctgatctctgagggatctcttgaagatatcaatacatatcaagtttcctatgaccgctacagacctgaagttcaagcgcggtggcgggaaaaagaaggcactgccactggtacgctgtatgatctcggctcccacatcatagaccaaaccctgcatttgtttgggatgcctaaagccgtgactgcaaacgtgatggcccagcgggaaaatgctgaaacggttgactattttcatttaaccctggactatggcaagcttcaagccattctatacggaggatcaatcgttccggcaaacggacctcgttatcaaatccatggaaaagattccagctttatcaaatatggaattgacggacaggaagacgcactcagagcgggaagaaaaccagaggatgacagctggggtgcggatgatccggagttttacggacagcttacaaccattcgtggctccgacaaaaaaacagaaacgatcccatcagtaaatggctcctaccttacttattaccgcaaaatagcggaaagcatacgggaaggtgctgcgctgccagtcactgctgaggaaggtattaatgtcatccgcatcattgaagccgcgatgaaaagcagtaaagagaaacgaaccattatgctggagcaataaaacaaaagcctccccaagtaaggggaggctttttcattagaatgtttttcctgcttctttcgcacgcgcaatcgcgtcttctttgatttgctgtgctttatcaggctccgcattatgtccctctacgaaaatgccatcgaaggatggtacgccgaaaaaattcatcatgatgccgatgtagcggtgtcccatttccatctcagccgcagggccttctgaatagtagccgccgcgcgcttggatatgaattgcttttttatcagttaacaagccgacaggaccttgttctgtgtatttgaatgattttcctgcaacagcaacagaatcgagatacgctttcatcactggcgggaatgagaagttccataaaggagtaacaaatacgtacttatcagctgatgcaaattgatcgctaagctctcccaaacggcctactttcgctttttcgctttcagaaagctcttcaaagcctgtacctgactgaagctttccccatccgctaaatacatctgcgtcaatgtgcgggatgttttctttgtacaaatcgatatgtacaacttcatcatttggattcgcttctttgtaagattcgataaatgctttacctgttgccatactgtacgaagttgcttcgtcatgcggatgagcagtgatatataatacttttgccatttttaccagccctttcgtttttaaaaatcacacatcaattattatcatacagatgcataatgattattctgtctctcttagactttattataaagacaaagaaatttactttcaagtaaaatatctcgaattaaagattatttaactttcccaaacagcttacttttcaaaagctgttctcaagccggaatacagcgcggacagttctttactgattcgaggataatgagggacatgcggcacttgaatatccgcaggcatccttttcactataaaggattgctcagccttttcaaaaaacgcccccagctggttgatctcttcatcagaaaacggagcaggcggacggcggtgagcttgggccgaaagcaaatagtaccctaagtgctgagcaccggaaatggcaggccagagcgcatccgcattcgcgtgaggaaactcgccaagcgccttgtcatacgcatcccgaagcctgacaagactcacccttaacttgtgttcgtcggcaatttgcccggttaacagtttctccataaactgcccttccagccggatgacattccgcacaagttctggcagccgcttggttgaaaaccgccgccacaaaagcattgttcccaacagcccgatcacgctgccgacagctacatcagtcagcctcgctatcataaaataaccggcacccgcgccgccatgcatactttctgtgataacaagcgcatttgcggttaaaaagggaacagccagcgcataattgcggacgatcagcatctcaagaagacattgcagcgctgcaatacaaaacgcaatataaacaccgcccagcttaaaaaacaggattgcacctgccagcataacaccgatcaccgttccggccgaacgctgaatagccctgtgaagcgtaaaaacaacagtagtgccaagcatgaccgctgctgccgaaagcggaatccaataggagcgtgcaaagccgaatgcgagggcaaacatatcggcggcaaacagaacaattccgtactttaacgctctaatcaaaactggagacttccagtcaaaagcatttctcaaaaagtaaaaagaggatggcaggcggcttggttccccgtcaagctgcttatcaaaacgtcctgaagcgatatgcaaaacctcattgatttcttcaaacagcttccgcctaggctcagattcgttctcattaatctgaaacgtaccgaaaacccgtgcatgcgcaagcatatctccggtttggcgaagtgccttttcaatctgcgcggtctctctgtccggcgtttcagctgaaaaatgaataatggcaatgaatatgtcgtcagctttttcaagcaggcggaaaaaccgttcatcatgccgcgattttttccgtttattccctttcccaagaaccgtttgtcgggctgttctaagcatgagcaccgtctgatgctgtgcgttatgaaaacctggcgttccgacggctgaaagacatgcagccagctgatgatatgttttttgcagcaccgctccctccggtccatgtttgttccataaccagccgattaaagcgatacccatggcgaaaatgccgccgagaaacgtcagtcccgctctgaacagcgcttgtgaaggatcggccggcagcccggaactgactaaaaaggcaaggacaaaaaacatcggcgcagggccttgaatgccgagcgcgctaaaaataaacatcgccgctgcaccgatcagccccaaaacagccgccatcatccaaagcatcccggacaaaagtgtccctaaaccaaatgagagggcgatcccaatagaaaccaagagcagcttcaaggcgcgctttttgtacgattcaccgcccgcatataaataaacaaagcctccgatacttgcaattaatccgtaatccgtgtgacctgccaatgcaccgaccagcacaggaaaccctgaagcgaaacctgatccgatagcctttttccaaggaaatggatttgcatgaatgcgaaaggcatccttcacgataggcatgattctttgattgttcgcagcagttttgttcatttgacaaaatccttttcaatgaatgtgtagaacttttcccgtttcttcgctttagtatgcccaaaaacgcggttagcttctcaattggtgcgcccgataaaaaaacagagacttataccgtctctgcttcattacatcagtttattataaaagcggcacctgtcaggactgttttgtccttctgccttccttcaagagcaggtgaataaaaaataaaggataaatcaatagatacccattaaacagccaccacacaagatcaaagtcactgctgaatgtccagaatgatagcgcctgcagacctgaacaacaggtcagcacaagagaaatcagcgccatcagcttccagtcagctcgattcacccgctgtaggtacaagctgtacaaccctgtgacagaaatcaggatatccagcggaaaaaaagaccagttccaagcgatcataaacggatggtcatgatgtttaaaagcccagctttccggtatgagagaaaacccggctgacagccagtacaagataaaaccgatatcagtcacgagaaaaaacagcttcatatatctcatttgtactgcccgcttttatgtaccggctcagacaccgcagcatgctcgatcaggtttaaagacacaacaccggcaataatcaaaccaattgaaatgactttcatgacactaacatgttcttgaaaaaacaaaaaaccaatgactgtaatcaggacgattcccatccctgaccatacagcataagcaacagatacatctattgattttagcgtaagcgtcagaaagaaaagactccctccataaaagaaaatcaacagcaaactgggaataagctttgtaaaaccagacgatagcttcatgctgaccgttcccgcaacttcaaacaaaatcgccaagcatagaaacacccaattcatgtcgcatcagcctcctcatcagctgttataccgttaaacaaaacatctacaattgattcaagcacctctcctgtcatgaactgatgtttcagcggatattcagggtcatacacttgattgatgctccctatatacatgtgaacaaacaggtccggattgatgtttctaattctcttttgctgtttgcactcgtctaataattctaggacaatggcccattctgccttaataaacgtgtctaatgtaagccacgcatcgtaatggtatttctttagttcatttaataatcccatgttcagcagttccatcccctgcggaaggctgatcagcatttttttcaccttttcaagcacatttaaactttcattttcatagatgtctctttctatttgcttcatttcagctataaattgttcgacaaccgcctcaacaagctgatctttagatgaataatatgcatagagagtccgcttgctcgttcccagcgctgccgccaaatcattcatcgtaaatgaaaatcctttctgcttgatcagccggaaggtttccgccagaattcttttatccatattaatcccccgctttcggtaccaagaaaactatttcggtaccaatattatacggcagaaatttatggaaagcaacaatatataaaaaaacctctcctattgggagaggtttaaaagacactgcggaccaaaccgccgtccgcccgaagtgccgcgccattgatcgcagaggaaagcggactgcttaaaaatgtaacaaagtgggcgatttcttccggacggatcagtctttgaataatagatgtcggccggttttctttcataaaacgtgcctcagcttcttgaacagtcaggttttcaccaggatacagcgagttcagcatggtttccacaccctctgttaaggtagagcccggcatgacggtgttgactgtgacattcgtgccggttgccagctccgccaaactgcgggaaatggacagctgcatcgtttttgtcgcactgtaatgcgccatttcctgtgacggcataatcgccgcttcactggcaatgaaaatcacacgcccttcctttttctctatcatgttatgcaaatacctgcgtgtcagccttacaccgctcataatattcacttcaaaaaaacgaaaccattcatcgtcgggaatatcaaaatactccgccggttcaaaaatccctaaattgttgaccaaaatatcaacctctggatatgcctgaaacagctcattgcagccttcttctgttcccaaatcaaatgcagccggataaagaaccgcttcagcatgttgtgttttcagttcatctatcgtctgattcactttctcttcccggcgtccgttaatgatcactgccgcaccttcttcagctaacgaagaggcaatagcttttccgatcccagatgtcgaaccggtcaccagtgcggtttttccttgtaaattcagcttcattattcatccctccgtttttgattcctcttatttattgacagaaatctgattggtgaaacatctgctctgcaatcagtatgaaacagctgggattgaaatggaagtacgcactttttggtgcctgtggtttggagaaaaaataaagcagaaccctctaagaggttctgctttattgtcagtatgtatggagacggtgggagtcgaacccacgtccagaaacatcgattacttaagcgtctacgagcgtagcctgcatatttatggtttcactcatcttcttgcctgcgggcgggccttccgagagctagtctgttcatctcttcttacgttctcagacaggaacgcaagcgtagcctacttggatgtgctcttcacagacacataggcaatgtcaggaagagctcgctgcgcttattaggcagctaatgctacgttttggttaaaactgttagttttgccagttatatttaagtgcgtttttacgagatcgcctctcggctcgcagctcaagctcgatccatccctgtcgaatccgtaacgtccccttggtataagggaaatacgggagaaaatatcaagctctcactcaaactggctatagtcttattataacatgatcacggctcttttcaattgtcaaatccttcaaatgaatggcgtcgtgatctgatcgtgaacacagtatagcacaggcctgattttcgaatcaagcactatgcctttagaagcctttttgactgtctctgaacgctctttcgatttcccgcttcgcgtccttgcgcttcaggtcttcccgtttgtcatagttcttcttcccttttccaaggccgagaagcactttcgcaaagccgttttttaaatacagcttcagcggaacgagagaatagcctttttcctttgttaacccgatcagcttattaatctccttgcggtgcattaacagctttcttgtccggagcggatcgtggttatagcggtttccctgctcatatgggctgacgtgcatattgtggagaaacacttctccccgttcgattttggcgaaggaatctttaaggtttacgcggccggcgcgaatcgatttgatttcggttccttgcagaacgatgcctgtttcataggtttcttctataaaataatcgtggttggctttcttattttgagataatacttttcctgacccttttggcatgccagaacctcctctctctaaggaaaaactgtccaccttttgcgatacgctctattttaccaaatgtcacgtaccgctacaatgaaaagctgtttccgaaagaaagcaaatagagcgctgcggccctatttgctggttgagctgctatttcttctttttccgtttctgtttcggagcattctggaagccgcgttttttctttttcttcttcggcttagtgaaccactcccctttttcctcagacggagctggagaaacaggtgtattggtgctttgaacacgttttctggcaggctttccgcgttttctgctccggctgctgtccaattctctcggacgccgcggagtgcccttcatgccgacaatttcaaagtcgatattgcgctcatctttattgacatcgacaaccttgactgtgatttcatccccgatgcggaagacgttgcctgtccgctcgccaatcattgcgaaatgctgttcgtcaaagcggtagtagtcatctgtcataaagctgacatggacgagtccttcaattgtattcggcagctcgacgaacattccgaagtttgtcacagagctgatcatgccgtcaaactcttcaccgattttatcaagcatgtattccgcttttttcaggtcatccgtctcacgctcggcgtcaactgcacggcgctccatagatgatgtatgttcggcgatatccggcaggcgttcagcccacttttcctgtgtcgcttcatcgactttgccgttgatcaaatacgttcggatcagacggtgaacgattaagtccgggtaacggcggatcggcgatgtgaaatgcgtatagaattccgttgacagaccgaagtgccccaagctttgcgggtcgtatttcgcctgtttcatcgaacggagcataacagtagatataaccgtttcctctggtctgtcacgtacagcgtccagaatgctttgcagcgcgcgcggatgaatattccccgccgttcctttcaccacatagccaaatgtcgtcacaaattctaaaaacttttgcagcttttcagcattcggctcttcgtgaatccggtatataaacgggacgttcatccaatggaaatgctccgccactgtttcgtttgccacaagcataaattcttcaatcagcttctcggcgacagagcgttctctgatcacaacgtctttaaccgctccttcgtcatcaacaagcacctttgcttctttgaaatcaaagtcaacggcgccgcggtccatccgcttatcgcgaagaatttgagccaggcgctccatgtctttgaacatcggaacaagaggctcgtatttttgcttcagctcttcatcatcatcaacaagaattttattcacatctgaatatgtcattctttccgttgttttgatgacactttggaagatctcgtgctctgtcacctgtccctgactgttaattgtcatttcacaagaaagcgtcaggcggtcaacctttggatttaaggagcagatgccgtttgacaatctgtgcggaatcatcgggatgacacggtcaaccagatacacacttgtccctctttcaagcgcttctttgtcaatcggcgagttttcggttacgtaatggctgacatcagctatgtgaacgccaagcttgtagcttccatcatcaagtttcgtcacggtaactgcatcatccaaatccttcgcatccgcaccatcaatggtgacaatcacctggtcacggagatcacggcggtctttcagatctttttcatcaatcgtgtcaggcgtacttgatgcctgttccatcgcgtcagctggaaattctcccggcaggccgtgcttatgaatgaccgataaaatatcaatgcctgggtcgtttttgtggccgagaatggtttcaacctcaccctctgcgttcatgcggccttcaggatagctcgtcagcttgacaacaaccttatgcccttccgcagctccatttttcccatttttcggaatgaagatgtcactcgtgatttttttgtcgtccggaatgacaaagccgaagtttctcgtttctgtatacgtgccgacaacccgctgaatcgctctttctaaaatccgtatgacggttccttcctgcctggagccgcttgactgtgaatttagacgcaccatgacgatatcgccgttcattgccgtatttagctcattaggcggaataaacacatcacttaacgacgtatcctcaggcagcaaaaaggcgaatcctttcgcatgggctgaaatctttccttttattaagttcatcttctccggaatgccgtagcggtcgcttctcgtccgtacgataagccctttttcttccaaggcgactaacgctttgacgagctctttaaactcctcggcttccgtaatatttaacatctcctcaagttcctgaacggtcagaggtttgtacgcctcttccttcataaacgagagaagcttttccataaatgcttctttttccattatccgacctcctgttgattaccaatcgagcttctctaaaaattcatacacatcctgatggacgaggtcacgttctttgtcgagtgtaatgacatgccctgattcctcgtaccatttcagctgtttatcatcagtttccacttcgttgtaaataatattggcgctttcggtattaatcatgtggtcatgacgggcctgcaccacaaatgtcggtgaataaatcatatcgacattattccgcacatcagcaattaagtcttgtagcgccttgagggtattcatcggcgttttttcgaattctttcatttcctcttcaatttgctccgggcttttcccctcaaactttttgtaattgcgagcgtatgaaagaacgccttgatacatgacctcttcactcttaatatgcatcggtgcgcacattgggacaattccctttatgggtacagtgtaacccaatttcagcgaaaaaaccccgccaagcgacagtccgcaggcagcaatgctctcatagccttcagattttaagtattcatagccatccattacgtttttccaccagtcttcgggccccgtatgtacaagttcttcaggcgggacgccatgtccttcatattgaggcgcgtggcacgtatagccgcgttcattcaaatatcgtcccagcatccttacatccgctgtattgcctgtaaagccgtgcagcaaaagcaccgctttgtctccgcctttaaatgtaaatggttttggtgtcacaactttcatgctcatgtctccctttctatctgcacgatcattttagttttccacagtttaatcagaaaaaaacgttttgaatatcatccagaaacgtgaaaaaggcctgacttcacatcagaccttatacaaacattgccctataggatataagcaagcgcaatcgttaacacgaaaaacaagactgccagcactaccgtaatgcggtgcaaaattaaatcaagacctcttgctttttgtttcccgaagagctgctccgctccgcctgaaatcgcaccagataatccggcgcttttactggattgaagcaaaacgacaataataagtgcaatgctgacgataaccaataaggtaatcaaaactgcgtgcatcccatacacctccagactcactggctacattacttctattttacatgaaaagggttggcatgtcacgctgtatcagacgccaaaaggccggataagacgttttatcttggttaccctattcatatgaaaaggacaaaggagaaaagcgatgccgcttatcagcatagacagcaggaaacatcttttttatgaagaatatggacagggaatccctatcatttttatccacccgccgggcatgggacgcaaggttttttattatcagcgccttctatccaagcatttcagggtgatttttcccgatttaagcggccacggtgatagtgatcatatcgatcagccagcgtctatttcctattacgcaaacgagatcgcgcaattcatggacgctttggatattgataaagctgtgttattcgggtattctgccggaggcttaatcgcgcagcataccggcttcacccgccccgacaaagtgtcacaccttattctgtccggcgcctaccccgctgttcataacgtaatcggccagaagctgcacaaactgggaatgtatctgcttgaaaaaaaccccggtttgctcatgaaaatcctcgctggcagccacacaaaagacagacagcttcgcagcatattaacagaccatatgaaaaaagcagacctggcccattggcatcagtattatctggattcgcttggctacagctgcattgaacagctgccccgcctagaaatgccaatgctgtttatgtatggcggcctgcgggactggacctttacaaacgcaggctattaccgaagatcgtgcagacatgccgaatttttcagattggaatatcagggacatcaattgccgacaaaacaatggaaaacgtgcaatgagctggtgacacggtttgtgctgacacatcattcaatatagaaaacgttggatctccttgcgttttctatattttattgacttttgtcaacaaaatcatagtaaaaaagatcctcaaatttcaaattaaaatagtgaagcattttaccgatcacaagctgccccggccgtctttctccattcagcacgcggctcagtgtggcgggtgagactccgatttccagcgcaagctgattaagggaataatcgttattaaccatatactgcaagacataatcacgtctaatctgtatcttttctactggcactttcctcaccttccattcctgaaaaacttttttctatacttttacattacggcttatgttaacttttgtcaatacatttccagtctacctattccctttagtcaataaacatactaaaatatgagtaacagtgagggacggggtgagatatatggaaagctttggcgaacaattacgggcattgcgtgaagagagaaagttaacagtcaaccagctggcgacttattcaggcgtaagcgcggccggcatctccagaatcgaaaacggaaaacggggcgttcccaaacctgccaccatcaaaaaactggcagaggccttaaaaattccttatgaggggcttatgtacaaggctggttacatcgaagaagtgcatgaagccagggccccttacgaaacgaagtgcaagctgcttgaaaaagcggaggcctatgacctgaaaaaccttgcgcttcttgagaacgaaaagtggcaatatctcaataaagaagatttgctcatgctggatcattatttttcgtttatttcagacgaagccaaaaaacggtctgctgatgactgactcttgatagaaatgtgaggcgatagaccatgtcaccgttcggacagcaattacgggagctgcgccgcgcccgcaaactgacagtgaatcagcttgcggtgtactcaggcatcagctcggccaccatttcaaaaattgaaaacggcaaacgcgggacgccaaaacccgccacgattaaaaaactggcagccgtcctgaaagtgccgtacgaaaacctaatggccgccgcaggccatattcaggcctttcctgaagaaatccgcgaagcatctgaaagctatcaatccgtttatgaaatttaccagacggctgtcactcgcggagcggagcacctcccgattttcaatagtcaaaaatgggaacatctctcaaagcaggatattgaaaatctcagcaaatacttcgattttttgtcttcagaagcaaaaaaacgcgcctcttcctcataatcccctgtttctctttctatattttatcaatcacgcttgcataccctccctcgttatttgcgttataatagtgacagacgaggtgaaaagtatgaaccaatcagaaatgtgtcctagatttgaaaaagcagtcgacatcttaagtaaacgctgggtcgctttaatcgtatttcagctcttgaacgggtctcagcgatttagcgaaattgaagcagcacttccaaatctaagcggcagagttctgtcagaacggctgaaagaacttgagcttgaaggagtagtgaagcgggatgtcatccctgaaactccggttcgcatcgaatattcattgactgataaaggaaaggcactagcacccattttaggtgagatttctaaatgggcgactgaatggattgacccttcctttcttgactaattgctaaaacggctctgatctcaaagatgagaaaagagccgttttttattttttcccaggtgaaaaaacgatttctcagccgatatatagtacatccacacattacgtttttaaaggagaccactatatgcgactgacgatttcccgcaaattcagcctggtatttttgacactgatcctgatcaatttacttgtaggcggaataggcgttcttaatatgcagcatatcattcaaaaaacagatgaaatcaacacaaaatggattgacggcatcaaaggaatcacttcaattaattatgtaaccgagcacctgtcttctaaagaaaaggactttctgatttatacagacaaaagcaaaatggatacacttgatcaagaaatgaatcaaatcatggaagacattaaccaaaagctcgataactacgaaaaaacgatctccactgataaagagcagaaactgttcgagcagcttcaaactgaagtgaatacctatatggatattcatgcgcaaattatcgaaagcggccgcacgaatgacatggacaaagcaagaggtttattggttcagactgaggccagctttgaggatatgaaaaaaacaatcactcagcttgttgacttaaatcaagaaggcagcaacacagcggtaaaagaaacgaaggccgtctatcataaagggctcatttacactgctttgcttgtggcagcttcgatcctcatcagcattttcatctggctttatatcacgcgaaacattgtaaagcctatcattcgcatgaaggaatctgccaatcatattgccgaaggcgatctgtcgaacgatatggagccgctcaactcaaaagacgagctgggtgatctgaatgaagcgctgcaaaaaatggtagggaatctgagagatattgtcggatattctaaagacatatcaagccgggttctttcttcttcacaggtgcttgcaaccgcaacgaatgaaacaagatccggcagcaaacatattaccgagacgatgaacgaaatggctgagggctctgaacagcaggcccaagacgccgtgacgattgccgaatcgatgaatgagttcactgaaagcattgataaagcctataatcacggcatcaccatcagcgatacgtctcaaaacgttctcgaactcgcggtaagcggaaacgaaaatatggctacgtcattacagcaaatgaaaaccatccatcatattgttgaagaagccgtgcataaagtgagatcactggaacagcattctcaggatatcaacaagctcgttcaagtcatcaacggaattgccgagcaaacgaatttgctgtcccttaacgccgcaattgaagctgcccgcgcaggagaaagcggcaaaggcttcgccgttgtggctgatgaagtcagaaagctggctgacggcgtttctgattccgtgcaggacattacccggattgtaaacgggacacagcaggagatccacactgtcattacgtacttggaaagcagctttacagaagtcgaaaaaggaacggaaaacctgacagacaccggacaggctatgcagcatatcaaacaatccgtcacccatgttgcagacagcattaaggaagtaacggatggcctgaagcagttaacaaaccaatcgattaccatcaatcaatcgattgaaaatatcgcttctgtatccgaagagtctgccgccggcattgaagaaacattttcaattaccgagcaatccgcccattcgatggatcaagtgcttctaaatgctgaagagcttgagcagctggccaatgagcttaatgagaagatgggtcagtttacgatttaaatagaaaaaagaggctggactccagcctctttttctattctatgcagctgattgaacatgtttcgccccggttctttttttcttcaccggacttaatgcccgctccagccaagccatgagcaaatccgcccctaccgccatcaccgcagttggtatcgctccggctagaataatcgcagttccgtttgttgcgtttgagccgcggacaatcatgtccccaaggcctccggcaccgacaaatgtgccgatcgctgtaattccgatggcaatgacgagagccgtgcgaaggcccgccataatgacagaaagtgcgagcgggagctcaaccattctgagtacttggaatttcgtcatgcccattgcttttcccgattctaagtaggcatgttcaatactgataatgcctgtgtacgtgtttcgaataatcggcagcagggaatacagaaataatgatagaatcacggtatttgcgccgagccccataacaagcattaagacggccagcatagcgagcgccgggattgtttgaataacgtttgttacggcaaacacccaggctgacaaacggcgaaaatgcgcgatgaggattccggccggaaccccgacgacagcggcaaataaaacgccgtaagccgacatgagaaagtggcggccgaattcatccatgacgtaactgccattctgcgcgtaatacgtcattaactgttcaagcacgttcattgacctcttccccctttcacgattcgaagtagtgatgtttttctaaatattccttggcaacgacagacggttctttgagattgccgtcgacttcatagttaagctcctgcatcgtggttgtgtcgatttttccgagcattttcttgatgatgccttcaagctcaggatgttctttgagcaccttttccggaacaaccggagagcagtcgtacggcgggaaaaattgtttatcatcctttagcattttgagaccataggacttgattcttccatcggttgaatacgcaagcacaatgtccatttttccgcttttcaccgcgtcgtacacaaggccgatctgcatcggatacgtgccgccgaatgtcatgccgtaggttttcgtaaaatcctgatagccgtttcctttgagcttcatccaatagttatcaacgcccagctttaattgcggcgcccattttttaacgtctgatacggtctctaaatggtattggtcggccagttccttgctgactgtaaaggcatatgtattatcaaacccgtaggagttataccattttaaattgtatctttttttaaactcccgctgagtaagcgccagcgctttgtccggatctttttcaggttccattctcaacgtgcctgtcagcgcgtctcccgtatatcttgtggccgcaatgtcaatttccccgttcattaaagcctgctgctgcaccgcgttggagccaagatttttaatcgttgttgttttgagatcagtatggtgttcgatcaactggccaagcatactagcgatgatttctgattcgctcatgctttgcgcgccgattttaatggtctggtctgcagcagcgctgagaccaggaagcgaacagccgctcagcgtcagcgttgccgcaagtgctaaacctatgattaatttgaggtattttcttttcatgagccccctccttatgacaattcattcaatctctgcatgccggcaggtgtcagttttcgttcagcaactgcaagcacataatcaatcacaattgccaatatcgtgacaggtaccgcgcccccgatgatatattccggctgatataaattcagtccgataaaaatgtaatcacccaatccgccgcctccgataaaggaagcaagcgtggcccagccgattaagtaaatcgtcgatgtcctgattcccgccatgatcactggcgcggcaagcggcagctccaccaagcggacttgttcagccggcgtcattccgattcctttaccagactcgagcagatttttgttgacgccgcgaatgccggtatacgtgttgcgaagaatcggcaatacggaatagaaaaacaaagccacaatggccggaaccttccctacaccaaggagcgggataaaaaaagcgaggatggccagactcggcagcgtctgaataatattgacaatgccgataatggtgccggctccttttttcattctggtaagcacaaccccgagggggacggcaaccagcacgcctaagatcacagcaatgagcgatatcgtaatatgctcgtatgttttataaagaagctcgcccccattggtttgcaaaaattgaacaatatgatgcatgacttatcgcccctccctatgacaatgctgcgagctgcttttcttctccccagagggagtcatacacgatgtcgaccagacttgccctcgtcacaattccgatcaggcgtcggtcttcatccacaacgggaacatatttgacaccccgttttaaaattttgcggaccgtgtcgcgcagcagtgtgccgcccagtactgtgtatatatcttcatgtaaaacttcactgacgagattggcctttttccggcattgatcaatgatttcaacatcgacatagccttgcagaccgcgctcgtcatcgacgaccagcaatgaatcgacccgttcctgcctcatcagctgaatggcctcagaaagcgttttatccgcggtgatcgttacaggctgtgtgttcataatctggtcaacccgttcaacatccgggctggatgactgaatcagccgctccttgccgataaattcctcaacaaattcgtctgccggatttcttaaaatgtcatcgggcgttccaacttgaacgatttctcccgcttttaaaatcacaatccggtctgccagcttaatcgcttcatccatatcgtgggtaacaaatacgatggttttatgtaaggttttttgcagttttttaaattcttcctggagggaatccctcgtaatcgggtcgagtgccccaaacggttcatccattaagataagcggcggctccgcggcaagtgcccgtaatacaccaattcgctgctgctgccccccgcttaattcatgagggtaacggtctacatattcaggccccatatcgaccaattttaaaagctcacgcgcccgctctttccgctgctgctccggccatttcagcagttttgggacgagtgagatattctgctgaatggtcatatggggaaacaggccgatctgctgaatcacatagccaattttgcgcctgagctctacaggatcctggtccatgatgttttcgccgtcaatgaaaatcttcccggcggaaggctcaattaatcggttaatcattttcattgttgttgtttttccgcagccgctcggcccgataaagcagataaattcgccttttgcaatcttaagatttacgttgttcacggcttttttgccgcccttgtatgttttcgagacattttctaatgtcagcaaacatcgcacctccaaaattaagtttattcaatttgttcagtttaaatttaatttttcagacaattgaatgcttcccattatagaataaagtttataaaataaaaagtttacaatttgttcatattatttataaagtatgtgtaaacgctgatttacccgcattgacgtgtgttgatctccttattgctccaatttcctgccaaattctcttttgacagcattttcgccgtatcaaaaatgtggtatattgacatcggaattgttagctgaaaggatgaaaccgttggagaaagatccgttaacgatcattgaacaagccgaggaccattttatagaaaaaatcgcggaaaacatgcatgcatttggaatgccctctaccgtcggacgagtgctgggcattatttatatgaatcgaaaaccgatgacgcttacggaattatctgaggccaccggcatgagcaaaacacgcatgagccaggtagtgcgggaaatgcttgatgccaacattgccgagaaggtgttcgaaaaaggcgtgcgaaaagatttatatgaggttgagcaggactactatcaaacatttatcacgctgttttcagccacctggagcaaagtcgtcagcaaaaacaaaatgatgcataaaaaactcaatcgggagctgcttagcgtgttggatgaagagcttactcctgaagcggaagaaaaagtgaatgagctgctgaaggaattaaaggaatggctcgattattataattggctcagccgtttgattgagttttttgagagcgaagaaatttttaaatatgtgccgaagccgtaaaaaacgccctgtcattacaaggcgttttttcttatgcggcacctgccaggtttttcttttttctctttttaatcgggcttaatgctcgttcaagccagcccatgaccaaatcggcaatcaccgccatcagagctgtggggatcgctcccgctaatataatcgcggttccgtttgtggcgtttgatcccctgacgatgatgtccccgagaccgcctgcaccgacaaatgtcccgatggccgtaatgccgatggcaatgacaagcgcggtgcgcaggccggccattatgaccgaaagcgcaagcggaagctcgaccatccgcagcacttgaaattttgtcatccccattgcttttccggattcaagataggcgtgctcaatactgataatccctgtatacgtatttctgataatcggcagaagagaatacagaaataatgacaatatcactgtattagcgcccagccccatgacaagcatcagcacggcaagcatggcgagagccgggatcgtctgaatgacgttcgtgaccgcaaaaacccatccgcttaatcttctgtatctggctatcaggatgccgagcggaattccaacaatggcggcaaataaaacgccgtataccgacatcagaaaatggcggtaaaactcctgcagcacataaccgccgttttgcgaatagtatgtgccaagctgctgtagtacttccatatgatccacctcttttcttagtcaaaataatgatgtttctctaaaaattcctttgctacgacagacggctccttcagcttgccatccacttcataattaagttcctgcatcgtttccgtgtcgatttgcccaatcagcttattgatcacaccttcaagctccggatgcgccttaagcaccttttccggaatcaccggtgaacagtcatacggcgggaagaaacgcttatcatcttttaagattttcaagtcataggctttaatccgtccatccgttgaataagccagaacggcgtccattttcccgtttttgactgcgtcatagacaagcccgatctgcattggataagttgtgccgaattcaaagccatatgtgctgacaaagcctttatacccgtcaccttttcgtttcagccaagcattgtcgacgcctaatttatattgggaggcattttttttcaggtcggacacggtgttaatatgctcattttccgcaaacttttttgttacggtgaaggcatacgtgttatcaaagccgtaggaatcaaaccatttataagaaaagcgcttttgaaactcgttctgcacaatgttcagcgctttttttggatctttctccgcttccttgccgagggtgcttgttaaatctgttccggaatagcgcgtggctgaaatatcaatgtcaccgcccagcatcgcttggtgctgaacatagtttgagccgaggtttttcactaaagcggtattcaaatctgtatcatgttcaataagctgcgcgatcatattcgctaaaatttctgattctgtcatgctttgcgccccgattttgatcgtgtcgtcagaagcgccgccgagacccggcagagagcagccgcctagcagcatgacaaagacgagagcaaacgcgccaagccatttgatttttgtcgttttcaacagagccaactccttacgaaacttccttcatcccttgtaatcctttcggcgtcacctttcgttctgtcacggctaggacataatcaatgataattgccagaattgtgacaggcacggcaccgccaatgatatattcaggctggtataggttcaggccgataaaaatatagtccccgaggccgcctcccccgataaacgacgcaagtgtcgcccagccaattaggtagatcgttgatgtgcggatccccgccatgatgatgggaattgccagcggaatttcaacgagccgaatctgctcccagcctgtcatgccaatccctttccccgattccaggaggtttttatttacacctttaatgccggtatacgtattgcgcaagatcggcagtaccgaatagaaaaataaagcgacaatcgcaggcacttttcctacgccgagaagcggaataaaaaaggctaaaatcgccagactcggcagggtttgcacaatgtttacgaaaccgataaccgcacctgcgccttttttcattctggtaagagcaacgccgagcggcactgcaacgataatgcccaatacaacggctatgagtgaaatatataaatgctctcctgttttatacagcagctctccgccgttcgtttgcaaaaaagtcatcatttgattcatcttaaaagagctcctcccctggtcagatcgtcatgagctggttttcctcgtcgccccaaatggaatcgtacacgatatcaacaaggctcgctcttgtcacaatccctgctaaatggttctgttcatcgacgaccggaacatacttgatcccctgcttcaaaatttttcggactgtatcgcgaagtagcgcccctttttgaacggtatatatatctgagcggtatacatcgccaacgatgctcgcttttttgcggttttgatcaatcatttccacatcaacatagcccttcagcacgttttgccggtccacaacgagcagcgagtcaacacgtttttctctcatcagctgaatcgcctgagaaagcgttttgtccgcagataccgtcaccggcgttctgttcatcatttgctctacccgctcgatatccggtcttgactgaatcaggcgctctttcccgataaattcttcaacaaactcatttgccgggtttcgaagaatctcatcaggtgtgccgacttgaacgatttctcccgcttttaatatcacaatcctgtcggcaagcttaatcgcttcatccatatcgtgggttacaaacacaatcgttttgtttaaggttctctgcagttttttgaattcttcctgaagggaatcacgcgtaatcggatcaagcgctccgaacggttcatccattaaaatgagagggggttccgctgccagggcgcgcagcacgccgattctctgctgctgtccgccgctgagctcatgcggataacggtctaaatactctgggcccatatccacaagctttaacagctcgcgcgcccgttctttccgtttttcctcaggccatttcagcagctttggtacgagtgagatgttctgctggatggtcatatgggggaacaaaccaatctgctgaatcacatagccgatttttctcctcagctcaaccgggtcctgttccataatattttctccgtcgataaagatccttccagacgatggttctatcagtctgttgatcatcttcatcgttgtcgtttttccgcagccgctcgggccgataaaacagataaattcaccttttgcaatatctaaatcaatgctgttcacagcttttttgccgcctttatatacttttgacacttgttccaatttcagcaatccgtgcacctccgcaggtttcctttaaattttctgaaaagtataatccttattatagtttgaactttgtaaaataaaaagtttacaatgtgttgaaattatatgttatttatagattatttattgttatgaccgagacggaaagggtgttcttacaattacgccggatacctcccacttcctctgcattcagctattttcaacaccaggaagaaatatgatatattgacaccatcaattgccatttgaagggatgatcagctgtgaaaaaaaccgctctcgacatcattgaacatgctgaagagcatctcattgagaagattgccgaaaatatgcatacgtttggaatgccttcaactgtcggacgtgtgctcggaattatttatatgaatcgaaaaccaatgaccttaagcgagctctctgaggcaacgggcatgagcaaaacacggatgagccaggttgtccgggaaatgatcgatgccaatatcgccgaaaaggtgtttgaaaaaggcgtacgaaaagacctttatgacgtcgagcaggattattatcaaaccttcatttctttatttgcggcgaattggacaaaggtcgtgagcaaaaacaaagtgctgtataaaaaattaaaccgggagctgagtgatcttttacaaagggacgggcttaccccggaagcggaagagaaagtcaatcagctgctgaatgaattaaaagaatggcttcattactatgattggctgagcaggttgattgaattttttgagagtgaggaagtctttcggtacgtgccaaaaacaaaagaaagcagctctctaaaataagggagctgctttttgcatcatgaggttaagatcggaaacatgcctttcagccccgcaccaatcatcccgaccgcaaccacggctaagattaatcccatcagtctggtaatcacattcatctcggtttttccgagtttgctgctgataaaagcagaatagtggaaaaagagaaaggtcagggcaataacggcggctatgccgatcgtgacagccgcataatgaccaatgccgctatgaccggcggaaaggctcatcactgttgcaatcgttccgggcccagcaatgatcggaatggataaaggtgtgactgatatatccgctttttccttgctttccttatgttcatcatggtgaagagattgcacgtgtgattctttcgcattcaatagattataggcaatgccgaaaatgaatatgccgcccgccactcggagcgcgtaaatgttgatatcaaacagtttaaagataagatgaccgaaaaccaaaaaagctgcgagaataaaaaaggataaaatagctgccttccgggcaatcgcttttctttccgctgcagtatagccttctgtcagcgtcagaaatatcggtacgtttccgatcggattcgatactgcgaataaaaaatgaagacgtgaacgataaatgagaacatcatatacctccttgttgatagtctctgcacaggaaatagaattattctccacccttttacccggaggcgatttcccggtaaacctttatagcctgtcagaaacgcgccatgctacaatgaagtgacaaattgaataggaaggacgtatacagatgttcaaaaaaattgcggcagatgccttgggcttatctgatatcggaaaaattatcgtacctcaggactatgacaaaacagacgcagacgactatgtcatgcatgaagataatgagaaaatttatttcttgattaaaacaaaagcagacgagtattgctttacgaacctggccctgatccatgtagacggcgaacgcgccacttcctcgaaacgaacgttgaaacgctatccttattcgcaatataaaatctctgacgtttttcttgaaactgccggaaaagtggatttggatgttgaaattaagttcaagctgggcggtgaacaattcgacattgatgtccacaaagaccagattgaaaagttaaaagacctttataaagcactgcttcgcatcgctgaaacaacctatgaaaatgacattttaatcaatcaagcggagcaaagcttagataaagcagtgacgattcttcaccatacccgccctgagcacgtcaatattgaaacgcaatacaaagagctgaccgaattcggattcacttggctgacatccgttcgctcgcagtatcatattaaggattttggggatgtatttgagaaatatattaataactagataaaagaagacacagctgctatcgtgctcgtgtctttttttgtatgaatattgattactttacaacttttttcttttataataaaactattagtctattttccctatattacagataaaggagttattttatgtattgtcctcaatgcggccatcaaacagatggcggaaatttttgtgagaaatgcggatcaccgctccccggtcaatcaggccaccagcatgcagctcaaactggagccgctgcaaagcaagcagcaaaacagttcggttcatttgtcttatccgtcctgaaacgcccttatcaggaatgtaaagcaacaggcggagaacagctgatcagcgcaatcattacgatcgttcttttcagtttgctgacccctttgatgttttatattcttttttcagacggtcccgaaagcgtaagctttacagcaatcttcttagagccaaccatttattttattttatttctatttggcctgcatgcatgcatctttttcgccctgaaaatcgcgggaaaccaagtatctttcaaggattcattctcaagattcggagcgtttctcataccgtttacggctattttgattcttgcccttttcttctttttattacatacagacatttgctttaccatattagccgttggtttaatcggtgcattcttcgccattcctcctgcgatgctgagcagttaccagcattcatataaagggaaggttgatgtcatttactcaacgattgtaatttatctgatcatctgcgttacatttcagcttattatcgaacactatgtcaaagaaattttccgttatatgctcttttaaaaacaatcccatcacctgctggtgatgggattgttttattgaatagacgttaagtaaattcttccgttcttcactacgccggtgtaggtccagttatatgttctgagctttggactgccgcctgattttgtgatatagaattcttcatacgtcttaatcgtgatagccgacccattttggctccagcttttcacttcatagttattaaagtcttctgttgtcccctctttatttaatttcgacacgagatgctgctggtcggaataaagggaactgcctttttcaaggctgtcttccatcagtgagaaattattttgattcacggcatctgcctgactttgcagataactgcccataaataatgtcacttgttcatctgtaacatcgccgcttgcagagctttcactgcctttgtttttcgagccagcccaggcggaagtgtatgtctctggtttatcatttttgattttctttatatttgtgcctgcagattcgaatgttgattctgcatcttcgaaaatccactttttctgttttttatcatatgaaagaagatattcataactcggactgtcgtcagtcatttcagattttgtatagtcgttatacgaagaagactggtgaagttcttttcctgttaccgatacctgccacgttccgtcgtttttctgagagagggcaaatgtgtccaggtcaaaatcagtttccaagtatctatcttttaagtatgaatccgcgcttttcatagaatcgacggtgtccttcgtctccgccttccaattggcacttgcctctgtcatctgggctgtattcccatcagatagagctttggagtattgttttgttgttttgacaattgtgttcataatctgttcctgtgtatcttgatcaggaattaacgttaactccatttctttatcatcgatcggaacgccggcagtttttgtttttccccacggaaattctgcctcgactgaagctgtcattgatccatctgtcagcagcggaccatatgttacggatttgaacggatctttatgaattgacttgccgttaatcagcaaatctcccttcccgctcttgatgtcatccgctaagctgaatgtcacatcgtctgcttccaatgagagatcaacacgaaagctgctatcgccaatcgcctgaatgtcttcctttttcacaaggtcaacgacatcgtttttcagtttggctgagactgtatattcgccgggaatgtacggaccaagggtttgtgcttgatctgctttctttacagatccggcttcctctttattgacatatagatcggtatttttataattgctgctcacttcaaaataaacaggtgctacctttaagtcataatggtcaaataccagcaggcttttcccgtctttttctgcatatacgatatccttctgggctgtttcatcccgcagcgatgcaaaaagttcatcttttttgtctggatgatccttcaaatatgtaagaaacggttttacattatttttagtgagtttaagattgtcatttaccggtgtaagcagagtcgcgatttggtcctgatccccatcatttacggcctgttcaaacttgtctactaacctatcctttgaagtaaaatacgctccggttttatatgcggcgaataatataacgcacgccgcggcaatgctgctccataaaatgatggttttcttagggatcggttttcgcggagcctgccttgtttctgcagtgctagctgtttcttgatttgcctgtttgctaccccctccgatcggggtgccgcattgtttacaaaacttggctccttcattattctgggagccgcaattcttacaaaaaaacatgactttcctcctattctactaatttgataacatttactgcttttcatattttataataaaacagaatgaaattgggaacgaatgaaaaaattaaatgtctatcagactaaaaaggtggtacgaatatgcaaaagctcaggattgaattaggagaagaaacaaatgacgaactatatgatctattgctgctcgccgatccatcgaaagacattgtagatgaatatcttgagaggggagaatgttacacagcttgggccggtgatgagcttgcaggggtttatgtattgctaaaaacaaggccgcaaacagttgaaattgtaaatattgcggtaaaagaatctcttcagaagaaaggctttggcaaacagcttgtacttgacgccatcgaaaaagcgaagaagctgggggcggacacgattgaaatcggaacggggaattcgagcattcatcagctttccctctatcaaaaatgcggattccgcattcaggcgatcgaccacgatttctttctcagacattatgatgaggacatttttgaaaacgggattcaatgccgcgatatggtaaggctttatttggatctctgaaagcataaaaaagccgccgagagaaaatcccggcggtctttttattacttgtttaagttgtagaaagagttgataccgtggtattgagcagtttcagccaactgatcttcgatgcgaagaagctggttgtatttcgcaacacggtccgtacgagacggagcacctgttttgatttgtcctgcgtttgttgccacagcgatgtcagcgattgtgctgtcttcagtttcaccagaacggtgagagataacagctgtgtagcctgcgcgtttcgccatttcgatcgcatcgaatgtttcagtcaatgtaccgatttggtttactttgatcaggatagagttgcctacgccgtttttaataccttcagaaagttttttcgtgtttgtaacgaagaggtcgtcaccaacaagctgaacttttttgccaagacgctcagtaagaagcttgtggccttcccagtcgttttcgtcaagtccgtcttcgatcgagatgattgggtatttagaaacaagctcttcataccagtcaaccatttcagcagatgttttcacaacgccttcgccagacagatggtatttgccgtcttctttgttgtagaactcagaagatgcagcatccatagcaagtttaacttcttcgccaggtttgaagccggctttttcgattgcttcaacgattgtttgaagcgcttcttcgttagaaccaaggtttggagcgaatccgccttcgtcacctacagcagtgtttaagccttttgcgcttaatactgatttcaggctgtggaagatttgagcgcccatgcgaagtgcttcacggaagttaggagcacctacaggcatgatcatgaattcttgaatatccacgttgttatcagcatgctctccgccgtttacgatgttcatcatcggtacaggaagcgtttttgagttgaatcctccaaggtattggtaaagaggaatctgtaagaaatcagcagcagcacgcgcacaagccatagatacgccaaggattgcgttcgcaccaagtttacctttgttttcagtaccgtcaagctcgattaaaagctgatcgattgcgttttgttcagttacatcaaagccaagaagctctggagcaatgatttcgtttacgttgttaacagctgttaacacgccttttccaaggtaacggtctttgtcgccgtcacgaagctcaaccgcttcgtattcacctgtagaagctccgcttggcactaatgcgcggccgaaagctcctgtttctgtatatacttcaacttcaactgttgggttgccgcgggagtctaatacttcgcgtgcataaacatcaacaatgtatggcatgagttttgtctctccttttgattttcaaattatttttgaattaaagatgttcctgtcatttctttcggtttttcaacaccaagaaggtctaataacgttggtgcaaggtcgcctaggattccgccttcacgcagcgtaatgccttctttcgttacaatcacagggactgggtttgttgtatgcgcagtgtgcggttcgcctgattctgtaatcagaatgtcagcattaccgtgatcagcggtaatgatagcgtgtccgcctttagcaaggatcgcgtcaacgacttcgcccaagcattcgtccactgcttcaattgctttaattgttggttcaaccattccggagtggccgaccatatcagggtttgcgaagttaagaatgatcgcgtcatgcttgtcagcttcaatttctttgacaagcgcgtctttcacttcatacgcactcatctcaggcttcaagtcatacgttgcaactttaggcgagttgatgagaatacgctcttcacccgggaattcagcttcacggccgccgctcataaagaacgtgacgtgcggatacttttcagtttctgcaattcgaagctgttttaacccgtgctgagataatacttctccgactgtgttatcaagatttatcggtttaaacgctacatagccgtcaactgtttcactgaagtgagtcaggcagacgaaatacaggttctttggataattctcgccgcggtcgaagtcacggaagtctttgtttgtgaacgtgttggaaatctggatggcgcggtccggtctgaaattatagaaaatcacagaatcgccgtcttggattttcgcaacaggctcaccgttttcttttgtgatgacagatggaatcacgaattcatcgtagataccatttgcatatgaatcatcaacaacatccagggcgctgcggtaagatgggccttcgccgtacgccattgcgcggtacgctttttctacacggtcccagcgtttgtcgcggtccatagagtagtaacgtccggaaatgctggcgatttcacctacaccgatttccttgatttgatcgttcaactggttgatgtacgttttcgctgtctgcggacctacatcacggccgtcaaggaagccatggatataaacctctgtcagcccttcttttttcgcaagctttaacagtgcgaataaatgattgatatggctgtgcacgcctccgtcagataaaagaccgaacaggtgcaaggctttgttgttttctttcgcgttgctgatcgcgtcaaggaatgtttgattgcgttcgaactctccttcgcgaatggcaacatttacgcgtgttaagctttggtacacaatacgtcccgcaccgatatttaagtgacctacttcggagttccccatttgcccttcaggaagacctacagcctcgcctgaagcagtcaatgtttgatgaggatactggttccaatagcggtcaaaattcggttttttcgctaaagcgactgcgttccctactgtttcgttacgtaatccgaacccatcaagaatgatgagtgcagctggttttttactcatattgaccttcctccaataattgaacgaatgactgtggctcaaggctcgcgccgccgaccaaagcaccgtcaatatcggactctgccatatattctttaatgtttgcaggctttacgcttccgccatattggatgcgaagcttgtctgcagcttcttggctgaagctttcagcgacggttttacggatatgcgcacacacgtcattcgcatctttcgctgtagaagatttgcctgttccgattgcccagattggctcatacgcaataacagaagcagcaacttgttcttcagaaagaccagcaaggccttttttcacttggtcagcaacaagatcatttgttttgccggcttcacgctcttcaagcgtttcacctacacagatgatcggcacaatgccgtgtttgaaagctgcgtgtgcttttttgttaactgtttcatcagtttcagcgaacatttcacggcgctcagagtggccgatgacgcagtagtcaacgccaaggtctttcagagcaaccgggctgatttcgcctgtgaacgcgccgctttcttcgaagtgcatgttttgagcgccgacttttaggtcagtgcctttcacagcagaagcaagcttttctaagaaaagcgctggcgcgcaaacaacagcttcagctttgtctgctgctggaatggaagatttcacttcttcaacgaagctgacagcttcgccgagtgttttgttcattttccagttaccggcgataattggttttctcatctgttccacttccttatagcagttttgagattatttatcgttcagtgcagctacccctggaagctctttgccttccataaactcaagggatgcgccgccgcctgttgagatgtggctcattttgtcagcaaggccgaatttttcaaccgctgccgcagagtctcctccgccgatgacagagtatgtatctttcgcctctgccaatgcttccgcaaccgcttttgttccttgagcgaacaagtcgatttcgaatacgcccattggtccgttccacacgacaagtttgctgtttttgatgacgtcagcatacgtttcgcgtgttttcgtaccaatgtcgattgcttctaaatcactagggatttcagagatcggcacaattttcacgtttgcatcgttagagaaatcatctgcaacgagtacatcttcaggcatgtagaagttaacgcctttttctttagcgcggtccataaatgatttcgcaagctcgattttatcctcttcaagaagagatttaccgacttcatagccaagcgcttttacgaaagtataagcaagacctccgccgatgatcaggttgtctactttatcaagaagactctcgattacaccgattttgtcttttactttcgctccgccgatgatcgctgtgaacgggcggtcaggattggaaaccgcttttccaagtacatcaagctctttttccattaagaaacctgcaactgctggcagatgctcggcaattccagctgtagatgcgtgagcacggtgggcagcaccgaatgcgtcatttacatatacatctgcaagctcagcaaatgcttttgcaagctcagggtcatttttctcttcaccaggatagaaacgtacgttttccaatacaagaacgtctccgtccttcatctcagaaatttgtgcttttacagcatcgccgtatgcttcatccgcttttttcacttctttgccaagcagttcgccgagacgtgcagcgacaggagttaaacgaagctcctcaaccacttcgcctttcgggcggcctaagtggctcgcaagaaggactttggcgccttggtctgcaaggtgtttgattgttggaagcgcagcacggatacgtgtatcgtctgttacttccccgtctttcattggaacgttaaagtcaacgcggcagaatacaactttgccttttacgtcgatgtctttgagagtttttttattcatgcctaggagatcctccttcaaaatggtttgcatacagcacgaaaaacgtgaaaccgtctgttcaagcgataacgccgctagggcagatcgcagtctttttcggcacagggcagttcgtctaaaagccagggcagcggccttaggcgaaagcgccggcaaagctgcttaaaacgcggtcgtttctctatcacagagcgttttctgaaagccggtcttcatggaaaaagggaaagggagtccgtccccttcccttgtccgctttcattatagcgcttctattcgaaagaaccaagtcaggtcctttttcagctataaattaaagacctttttttgcgatgtaagctgcaaggtcaacaacgcggttagagtagccgctttcgttatcgtaccaagagattacttttaccatgctgccttccataaccattgtagaaagagcatcgattgtagaagagtttttgtttccgttgtagtcgccagaaactaatggctcttcgctgtagccaaggattcctttaaggtcgccttcagccgcttctttaagagctgcgtttacttcttcagctgttacttcttggttcagttcagcaaccaagtcaactagagaaacgtttggagttggaacacgcattgctccaccgttcagtttgccttttagttcaggaagaactagagaaactgctttagcagcaccagttgatgttgggatgatgttttcagctgctgcacgcgcacgacggtagtctttgtgcggaagatcaaggatttgctgatcgtttgtgtaagagtgaacagttgtcatcataccgcgtttgatgccgaatttatcgttaagtacttttgcaaacggcgcaaggcagtttgttgtgcaagatgcgttagagataacatcgtggttagccgcatcgtatttatcttcgttaacacccataacgattgtgatatcttcttcgttagcaggagcagagatgattacttttttcgcgccagcttctaagtgtttcgcagcgtctgcgcgttttgtgaagaaaccagtagattcaactacgatttcaacgccttgtttgccccagctaagtttagcaggatcgcgttctgcagaaacttcaattgttttgccgttaacaacaaggttgttaccgtcaactgaaacttcagcgtctaattttccgtgtacagaatcatattgtaaaaggtgagccagcatgttagcatctgttaaatcgttaaccgctactacctcaacttcaggattgtttaatgctgcgcggaatacgttacgtccaatacgaccaaaaccgttaataccgacttttactgccatgattgtttcctcctttaaataagtgagagatatttatattgagggattattcatcccttaataacttctttgcggctccttcgtctgtgacgagaaccgtgttgcgtggctttttaaagtaagcctcgatcgcctcggcttttgatgatccgcccgctaccgcaataatatcggggatggcgtctatgtcatccagctgcattccgacagaatgcactttgtgaaccacttcgccgtccgcgttaaaatagtagccgaacgcttccgtcaccgcgtcgttatcatctattttctttaagtcttctaaaggcgtgtttctgcgctgagccatagttttagcttcgccgattccatgaaccagcatactcgctgatttaatggtgttcagcacctctttgacagaaggctcttcaataatagatgaataggcgccttgtgacagctgtcccggaacaaacaaaagccggtaagtgcctgaagccttctccgccatatgcgcgcatatggtgttcgcctggtttttcacgtcttcgcctaaaccgcctcttgcaggcacaaacaaaagctcgcggtttttagaatccggcgtcatcatttcggcgacagcttcaattgtcgtaccgccagttacagcgacgatatttttgcctgaaaatctttttttcatacatgcgacagccgctcttcccatttcttttttgacccatggggattgatcgctgtctccggatacgataatggcatcctttagatttaaacgttcttttaatgtcttttccaaaagagtcaaacctaaaacatctttcatcgtatcttccaaaacagaaagcagttcatagccctcttctgtcaatgtcatgccgtttgtcttaatatcgaccaggttctgttcctttaaaaactgaacctcgcccctcagcacacgctcgctgatttcgagactggcagacaggcttcttcgcccgatgggttctgtcagcctgatatactgcaagatttcaaacctcttttgcataacgagcagaagatcaggcaataattttttttgagcttgtattaactggttcatgactcaaacgttccttccttttttgctggacgttatatgtcccgctatgacaaaaaacgtcccgtcatagccaaaaaaaatcatttctgctttctttaattattttaacagggtggaattgtttattcaactgttaagagccaattcatcgacaatattcgcagagttttcatgccgcgtcgttttatccagcaatattttatcctatatatctttatcttatacagaaagcgccaaatggtgcatcccaatataaacagcccttcccgtagaaagggctgtttcattaaagcgttttcattttatccaaagcttttcaatttcctcgagcgatttgttcttcgtttccggacagatcgtaacgacaaacaggaaacaaaggatgttaatcaccgcaaagatccaaaatgtataggcgagcccgaaagaatcgatcatcattggcacaaactgtccaatcgcccagtttgctccccataaaaagatggtcgcaatgcccgcggcccgcgcacgcagatggttcggaaagatttcagaaatcataatccatgtgatcggtccgaccgagacacagaaagcagcgacaaaacctaatataaggacgatcatcatgatcccgcttgttaactcaaagtaaaacgacgtcccgattaaaatcataaaaatagccataaaagcagaaccgatggacatcagtttttttcgtccgactttatcaatcagcaacaccgcaataacggtaaagatgacttctacaacaccgacgatacaagttgtcacaaatccggcgttttgcccgaatcccatcattttaaagatttccggcccgtagtaagtaatcgcgttcatgccgatgacttggttaaagagcgccagcaggattccaatgacaagcgcctttctgagccccggcttaaacagctgggagagcgaccccatttgttctatttttaaagagttctcaatgttctttaattcttcttttgcaacagtttctccattaatacgtgtcaggatctttaaagcttcatttgttttgcccgctttcgccagccatctcggactttccgggacgacgagcaggacaaggaaaaagatgacggacggcaccattccataagcaagcatccatctccagccggtgtgcacgccccattcgtatgttccggaccgctgcacagctagattaataaagtatgtagcggaaatacccagtatcgtaaagagctgatataaggaagataaacttccgcgtatggcgggcggtgccgcttctgtaatatacgtaacagagagcgatgagcccatcccgattcccagccccccgataatccttgcaatgattaaggtggacacgtcttgagaaagcgctgaaacgattgctgatatcgcaaataacaaagcggctgtcattaaaatttttctccggccgaatctgtcacttaaaaagccggatatcccgacgcccacaactcctccaatcataatgcttgaaatgacaagtccctccataaacggactcaggctgtataaatctttcagaaaaccgatggcgccagaaatcactgccgtgtcatagccatacaataagccgccaagccccgccgcacatgagatcaaaatgacaaatcccattgaatggcttcgtgttacaggaacatttggttctaattgagttggagtattcttcatttccctgccctcccgaatgttgagtaaagcgttttcatttaaaccttaaattgtacgtacttatattaaaatttaacgaaaattacatttaattagtacgtacaaatatagaataatcttgtttgcattttctgtcaatgttttcttacaaagaacgctgtgatatactgaaatttgtccgtatacattttggaggaatggatatgttaccaaaatacgcgcaagtaaaagaagaaatcagttcttggattaatcaaggcaaaatactgcccgatcaaaaaatccctaccgaaaacgaattaatgcagcaattcggcgtcagccggcataccatccgcaaagcgatcggagacctcgtatcactaggtctgctgtacagcgtgcaaggcggaggcacctttgtcgcttcacgctctgctaagtcagcgctgcattccaataaaacgatcggtgttttgacaacttacatatcagactatattttcccgagcatcatcagaggaatcgagtcctatttaagcgagcaggggtattctatgcttttgacaagcacaaacaacaacccggacaatgaaagaagaggcttagaaaacctgctgtcccagcatattgacggactcatcgtagaaccgacaaaaagcgcccttcaaaccccaaacatcggctattatctgaacttggagaaaaacggcattccttttgcgatgattaacgcgtcatatgccgagcttgccgcgccaagttttaccttggatgatgtgaaaggcgggatgatggcggcggagcatttgctttctctcggccacacgcatatgatgggtatttttaaagctgatgacacacaaggcgtgaaacggatgaacggatttatacaggcgcaccgggagcgtgagttgtttccttctccggatatgatcgtgacatttacaacggaagaaaaagaatcaaaacttctggagaaagtaaaagccacactggagaaaaacagcaagcacatgccgacagccattctttgttataacgatgaaattgcgctgaaggtgattgatatgctgagggagatggatcttaaagtgccggaggatatgtctattgtcgggtacgatgattcacatttcgcccaaatctcagaagtgaaactaacctctgtcaaacatccgaaatcagtgcttggaaaagcagccgccaaatatgtcattgactgcttagagcataaaaagccgaagcaagaggatgtcatatttgagcctgagttgatcattcgccagtccgcacgaaaactgaatgaataaaaaaagcaatgtatgggtctccccgctacattgcttttttttatagctgttatctgttgttccaaacgtcagcgatgatttcaaacgaacgcattctgtctgcgtgttcaaaggtttctgagttaaccataatttcgtcagcctgtgtcgttttgacgaaatcttcaagcttcgccttcacttcttccggacctccgacaatcgtggagctcagctgctcattgaccatcgctttttcatacgggctccagatttgatccatatcctcaacaggcggtttaagctggttcggcgtaccgcggacaagatcaagaaacctttgataatgcgaagtcgcaaggtgctgcgctttctcgtttgtatctgccgcgataatggtgacaccgaccatcgcatacggttcgtcgagcacgtctgacggcgtgaaggaattgcggtaaagctccaatgcaggaaccgtattcgctggtgaaaaatgagcggcaaaggcaaacggaagacctagttcacctgccagacgggcgctgaagccgcttgagcccagcagccaaatcggcacatctatgccctctccgggaatggcgcgaacttgattgcgcacatttcctgacggtttaaaataattgcgcagttcctctaattgttctggaaaatcctccccgctgttgatgtttctgcggagcgctctggctgtcaattggtctgttcccggcgcacgtccaagccccagatcaatccgcccgggatacagtgtttccagtgtgccgaattgttcagcaatgactaatgaagagtggttcgggagcataatgccgccggaaccgacgcggattttcttcgtgcctccggcaatatggccaatcaaaactgcagtggcggagcttgcaacaccttctatattatgatgttcagcaagccagtaacggtgatagccccattcctctgcccggcgcgccaagtccatgctgtttcggaatgattctgcaatcgttcctccctgaacaaccggagataaattcaagacagaaagcaaggtatctttgcgttggttgttagacatattgttctcctttgcaaatgtgttatcagtaaacagcccaaagctgtcaggtcatgattgaaagaacttctatcacaccataacacaactgcattcaggaataaaagaattttattcgatgaaattcgaacaatgtaaaacgaacggtttggcccgctattctgctccaaacagctccttagccatctcaataaagagcttagccgccagagaagcctcctttagcgacggaacagcaagctgcacatcacggtatacctgcgggtccaattcccgggtcaccacatgctccggaagcggcatccccgacatggacatttctgataaaatcgcgagacccaggccttctctgatcatactgatcgaggtgttgatgttatagaccgtgaaagctgggtgcagcgtagcgcccgcctgcctgaacatatcgacaaatggtgattcatagcctccgtcacagacgatcatcggttcatggtcaagatctttcagcgtaatggccgaatgactggcaagcgggtgatcgtccctgagcacgacagccattttgtcttttttcaaatgaatgtactccatctcctctgttggatacagaagaatcccaacatctatcatccgcgtatgaagccactccttgacttcatttacagttccctcgtgcagcacgagctcaagttttggatatttttgtttaaattcactgatcagcttcggcataaaataagccgaggcagttgagaatgtgccgatatggatcgttcccagttcaagccctttttccgctgctgctacctgctcaactttttcaatgccttttaagacttctctaatgtatactaagatctgttttcccgtatccgtcagcatcaggccattgcggcggtcacgaatgatcagctttacatcaagctcagcttcgatcgcagaaatcgcatggctgacagccggctgtgtcatgttcagcgcctgacccgcttttgtaaagcttcccgtttcagctattttcacaaaaacctttaattgtgtaatggtcataacaatttacttatgctccttataaaaaagattcattttatttatcttatgttctaccgtatcatatgatggaaaagttctacaaggagtgaatgaacaatgaagcagctctcaaaaacgcggacagctctcctgctcgcatttctcgtcatcatgtggggcgtcaattggccgctgtccaaagccgcgctcgcctattctccgccattattgttcgcgggcatccgaacgctgatcggcgggcttttattagtcattgtcgcactgccgcgtattcataaattacgcttaaaagaaacgtggccgatttatcttgtttctgctcttttaaatattacgttattctacggcctgcaaacgatcgggctgaattatcttccggccggcctgttttctgcaatcgtcttcttccagcctgttctgatgggtgtattttcttggctgtggctcggcgaatccatgtttgtaatgaaagtgattggcctcatcctcggttttgcgggagtagccgtcattagtgctgcgggctttggcgggcatatttctgtcattggggttctgctggctctcggctccgcaatcagctgggcgctcggaacggtatatatgaaaaaaacaggcagccgcgtcgattccatctggatggtcgctctgcagctgacgatcggaagcgtgtttctgctaatatccggcttttggacagaaagcttttcggcgatccaatggacagctccgttcattacgagcctgctgtttatctccgtattcgttatcgcactcggctggcttgtcttttttacgcttgtcggttcaggagaagcaagcaaggtcgcatcttatacttttttgattccgctcatatcaatcgtggccagctccattttcctgcatgaaccgctcacccttagcctcttggcagggctgctgctgattgtcacgagcatctgtctcgtgaatacaaaatcaaaagcgcagaaagctgcggcgattggtataaacgagaaagctgcacaataataaaaaccctcttgccggatgcggcaagagggtttcttatttactgatgcttgcgtcctttgaccaaatatgcaactgtaatcaaaaggtagatcgccgcagtaatgccggtaatgacaattgatgttgtcatgatgaccccgatcagaatggcgagtaatgccacaatcgcaaaccatgtcgtgtacgggaaccattttacataataggccggtgtttccgtttgctgttttctcgattttaaatgagcgaatccgatgatcagccaaatgaataaaacggtatatcccaatgatcccattaaataattaaatgtttggcttcctgcgaacagagaaatcaatacgccaatatagagagaagaagtgcacatcagaatcgcaaacatcggtacgtttttcgatgaaagcttcgagaagacctttggaagccttccgtcacttgcctgtgtatacaaaatgcgtgatgatccgtataaacctgaattcatagaagaaatgatcgccagcaggatgactgcattcatgatatgatccgcgcccggaatgcctaccattttaaagaccatcacgaaaggactttccggaaccgaattgacttggttccatggaatcaggctgacgatgatgaaaaacggcagcaggtaaaacgcgacaatccgtgtcagtgtgctgcggacagctttcgggacaaccttttccggattttttgtctctgcaagcgttacaccgataatttctgtaccgccgtaagagtagatgacgacaagcatcgccgtgatcagccctgtgccgccgtgcgggaaaaatccgccgtggtctgtcaggttggaaaatccggatgctgtatgatcaccgaatgatacaaataagagcagcaatcccagaataataaagataataataacggtaatcttgatcattgccagccaatattcggtttcggcgaagattttaacagaaagcaagtttacaatcgtgacgataagagaaattcctaatgccaacacccagatcgggcagcccggcagccaatattgaatgaaaattgcagctacaacagcttcagccgcaatgttgagcacccacattttccagtagatccagtccaaaagtaagcggcgtaatttcccaatacctgttggacaagatcacggaaggttctggcgttacggtttcgaacagccatttccgccagcccctgcataataaacagcaaaataatcccgccgagcagatatgcgagaatgacagatggccctgccacatcgatcgctgagctgctccccttaaataaacctgcgccgattgctccgcccagcgccatcatcataatatggcgggacgtcatcgtgcgttttaacgtttgattgtcgtttttcatcctcttctacctctccttctcgttttcaaaaacaaaaaagcccgccgtctcctacctaatctaatagataaagagacgacgagccttcggctgaccgcggtaccactcttgttgattcttcatgaagaatcctgcttttgacctgtaacgaaggttagccgttaaaacatagggaatattcaatctattccgttccgtcttaccactcccgggcgagttcaaagaagaatcaggctgcgtcgcaccaccccgcagctctctgttctgatcactttcttttactgctcccaatctatgtgttttagttttctgaaaaactcaaattttatgatctgaatatattaacataatatacgtgcttctcttttaactgtcaataacttcagagaaaaaagaaactgttattttgtcccttttcgaatggctttccaaaaggattctgactcgtttcctaatgcgtaaactgaaacacctgctattttatattgctttgccagatggcttttcgtttgaacggttttttcgttttcataccacacgacatgtttatgcttctttttgtcaacataagaaaacgtcatcgagcctgattttttgttgaatgccggctttgctttttgttttttgatgagggatttgagctcattccattcccttattgtgctggtacttccgtcttttacatcccagtcatagccgtacgcagggattcccatgatgactttattggctttgatctttttgactgaaaactgcagagagcttttgatccagtttgtgcttgccactgaccccggctcaccccaaatgccgtgttcatcgtaggtcatgacttgtacgaagtcggcatatttgccgattttcgcataatcatacggccagctccagtcatcatttttatcatcggcgcttttggccggaacggataccattgttttaatatgtttcttattcaaagcctgtgagacatattgaatgaagttcgagtatgcagcgcggtcttctggatttactgcttcaaaatcgatattgattccgtaatatgagtgctttttggccagtgtaattaattgatctgtgaatcgttttttcgctgttttattgctcatgacccgactcgctaaatctccgtcaaaatcataaatggcatcattatagtttgaaatgacagcccatgtcttgatttttttctttttcgcatatgtcagctgcttagttggggcatcgccaatgatttgtccgtttttttcaaacgcaaatgtatcggttgcgatggcattcatgtatgtatgatatttcgtaagagaattgtatgaagccgtatccccagtcgtgtagcctactgtcataccggctgccttcgcttctccttttgtatacataaacagaacaatcgcaatcgccagtgaaaccgctatgatcagccattttttcattgcatttcctcctgtatcaagtcatactcttctcatcggccaaaaaattggaagttgaagttttttcaagcaaaaagcccggcatatgcctgccgggcttcctgagttcagcggtcagagacgagaatatatgctgcctttactggtccatgcacccccacaactaaatccatttcaatgtcggctgagttactcggtccggtaatgtagttgatacatgaaggaacagtgacaccgttcgcaatgttttggcggatgatatcactggcttgtgtcattctcggtacaatgcttgatttcggcacgatcgcaatataagtcgttggcaaaaggctgacagagcggccgatgtcttttgaggagaagaggacaaccgtccccgactcagccaatgtaatttcgctgaatgtaatccctacattggcttgctccgcttttttaatattttcctcgcctttgtcagcatcccactcccagaccggcgttccttcactcggccagtccttggtgagcaggcttttcagtccgtattcttcaaagcgggggtccttcggaatgatgacagggcctccagaaaagcggctgacttgctcgcgcagggcatcgtaaaggccggttgaatccgtttcaatcagctctgtatggattttgacgcaatggtttttgagcactgtgactaagtcatccgctgaataaccttcaagtgttttatattgcggctcatacgcccattcagggactgccacgcctcctgttcttctttcacggcccaggctggatgcgattcgatttaaaaagctctcttgattctgaatggttcccttcgtcatcactgctcctccttcgtgcgttcacttgtttctctgtccgcaaaccagtctctgaatctcgatttatgcggtgccgggaagtcacggatctgggtccaatttttaagcgggccgggccctttcgaaattttttcgtcctctgtaaaaggcgtcatggcggccggcgcccattttgagcccattttgtaaagcgataaagaggatgcgccaagtccgaatgctttcattgcaagcttttcactgatcggcgctctgccttctttttcgacgatattctgacgatgcttgagtagcagctcatgaagcgggattttgaccgggcaggcttctgaacaagcagcgcacagtgaagacgcgtacggcagctccttataatcgtcataaccgccgagcaacggcgataaaaccgctccgatcggtcccgagtagattgagccgtatgaatgtccgccgacatggcggtacacaggacagacattgatacaggcggcacagcggatacattgcagcacagactggaattccgttccaaggatattggatcgtccattgtcaacgatgacaagatggaattcttccggaccgtccacttcaccttccagcttcggacccgtcaaagctgtaatataacttgtcagccgctgtccgacagcacttcttgtcagcatgctgacaagcacttcaaattcagaaaatgacgggacaatccgctccattcccatgacggtaatttgtgttgtcggcaaggtgctcacaagccgtccatttccttcattggtcacaaggctgacagaacccgtgtcagcgatggcgaagttacagccggtaatgccgatatccgcttccagaaactttttccggagaatggcgcgcgcatgcatcaccagctcttccggtttttctgtatgttgatagtccagcctttctttaaacacatcgcgtatctgctctttatttttatgaagggcgggcgctacgatatgtgacggcggatcgtgatcatcgatctgcaaaatatactcgccgagatcggtttctacgacttcacagccttccttctccagcacctcattcagattgatttcctctgtgaccattgatttagatttcacaattttcttcccgttcttcttttgaatgacatcacgaatataagaagacgcctcttccgctgtttccgcgaaatagacatgtccgcctcttttcgccacattttcggcaagctgtccgagatagaaatcaaggttttcaaggacatgctgcctgatttcctctgataatgagcgccactcctcccagtttcccagttcttctgctgcctctaggcgccgcgtccgcagacgctcctgtgcacctgaaacagcgcctctcataaattcattatcaatcccctgtgatacccgctctttaaaagcgtcagtaccgattttcatcgccatgatcctttccccctctgaatccagttttatctgctgttgagcacttcggcgatgtgcatcactttgacattcttatcttttcggccaagccgtcccccgatattcatcaaacagccgcagtcagcaccgatcagcacctctgctcccgtttcctccacacattcgactttttcatcgaccatctgctcagaaatctgcgccatcttgacggagaacgttcctccgaatccgcagcagttatgtttgcccggaagctctgtaaactgcaggcccttcacatggctcaacagcttcatcggctcctcccgaacacccagcagcctagtcatatggcacgacgtatgtaaggtcgcttttgtatgaagggtcgcgccgacatcctctactccaaggacgttcacaataaaatctgtcagttcatacgttttatccgccagctttttcgctttatcggcccatttcggatcatcctgaaacaggtgcggatactcccggaacatcgttgtacaggaaccggaaggactgacaacatattcggaatcctgaaacgtttcgatcatccgtttcattgcttttttggcgtcatgtacatagccgctgttgtatgccggctgcccgcagcaaatctgcccttccggaaaatcaacctcgcacccaagccgctccagcagctcaaccgttgcttttccgacatttgtttgaaacatatcaacaagacaagtgacaaaaagtgagactttcatgatgaacccctctctcatccccaatatatgatcaggtcatctgatgacctgagttaaaataactatatgaatatcgtacactattctgacaatggaaggaaagagttttctagggatattttcatttgtggcatatcaaaaacactcccgatctcccaggagtgcagtatatggttaaatccagcccttttcctcagcgatgctggcggcttctgtccgatttttcgcattaagcttttggatgatttctgagatatagtttcgaactgtgccttgagataaatagagctcaagcgtaatgtcttttgttgtcttgcctaaagccgcaagcctcagaatttcttgctctctaacggttagcggattttcgtctcgcatcatattaaacgtcagctcagggctgaagacacgttttccctttacacattttcgaatggcatcggccagatcgtcaatttcgccgtctttcagcagatacccatgtgcaccggcctttacggcgcgttcaaaatatccggggcgggcaaaggtggttaaaataatgaccttgctgacgcagccttttttcattaattcctctgccacatccagcccgcttcgaaccggcatttcaatgtccataatgcatacatccggctccagcttcaaaatagcatgtagcgcctcttccccgttcaatgcttgtccgatgactgtcatatcctcttctaaatcaagcaaggatcccaaagcgcctaaaagcatgcgctggtcctcagcaataaacagacgaatcattcttttcgtcctccaatcattctgcttttttaataagcggaatcgtcagtgccacaaccgttccgttatgatctgaaaccgttaatcccccttcaatgagcatgagccgttcttccattccccacaggccattcccaaacattttctccttcggcgctccctttccgtcatcccgtattacgatcctcattttgtcagcaaattgagaaatggtgatggcacagtgggttgctttgctgtgcttgataatgttagtcacggcttcccgcatacacatactgataatattttgagtgacgggagatatcactgaaaagtcgtcggctccttcgtattgaaaggtaatgttccccgctcttaatatgtgctgaatgtttacgagctcctctgttatcgtgaccgttctcatatcagaaaccagctctcgaacttgcttgagtgcggagcgtgaactggtttccatttcttttgcctcaagcttggtccgttctggatcagatgcagacagccgctgaatgagctggctttttaatgtaagcagcgacagggtgtggccaagagtatcgtgaagatcacgggcgattcgaacacgttcctcccttttagagagttcttttatctgttcgttggcttgtgcaagcttagcttcaagctcaatcctccgaaacatagaacgaattccgaatggagaaatgagcataatgacgagaaacgggagaacagaaaaaagctcccgaagcgagaccgaattcgcgataaattggtataggcatggaaaaagcagtataaagattaaagcgcagaacgcacggttaaaattcgttttctctttgtaataaccaacaaagtttgccggaaaaaaacctaagtatatataggtgatattgtaaaacacactatacatcaaaataaccgccatttgcacgataagccaatatgtaaacgaagctttgcccacgctgcagaataactggcgatatgccgctacaaaaaggagcagcataccatatccgatcccctgtttgacccctgattcttttaataaagagaggaacggcataatcgtatacaccagaaagatataagggaaaaacccgaattccttcgggaaaatagatattgcctttttcatgtattacaccgcttcttgttttcttcttatatatttagatagtagcatgaagagcatcatataagcgattaatatcagaatatttttccaagtcggactcccaccccggacaagttcccacgctccgctcccgaaatgataagacggaagccactggccaatgctctgcatcatgtcaggcatgacctcaaacggcatccacatccctccgcctaaagccagcagcatataaagcacattactgattccggccgctgtttctacttttctcatgaggccgattagtgtgcctaatgctaaaaaaggcaatgcgccaaacaaaatccacagtccgctcatcatccattcaaacggtgacaaggcaatatcattgatgattgcgccgaacagaaatatgacggtaattgataaaacgtgaatgacactttggccgatcatctgagctgataaatagatatgatccggaagaggcgtaaggcggataaaggcggtccagccttgtgaccgctcttgtaccattcggatgccaagcgtcatgatagaggaacccatcacgctgaagactgtcatcgacatcaggtaatgggcttcccatgcacgttgatcagggacgttggtattcactacatttgtaaagaaataataaaaggcaatcggcatgatcagagaccaaagcacaaagtacttgttcctaagcacccttttcatttcagcgatgctttgcttttgcagcacgttcactcacatcgcctccctgttgccgtcagccagctggcgaaatgcctcatcgagcgttgcttgctcaattcgaatatcccgtgcatgtatgttttcttgaaagatcagcgccaacactttgtctgtatttgatgtctggatgatggttctctcatgctcgtggatcactctctcgacttccgggtgacaagacagcctttccaatgattcacttgaatgaagcgtaaaggaaacagactgtttttgaattcttgagcggatttgcattggtgagccgtctgcaacaagctgtccttcagtaaaaaataggattcgctgtgcggcatcatctgcttcctgtaaataatgagttgaaaaaataatcgtttttccttggtccgacagtccgtgaatggtctgccagaatcggtgtcttgatgaagtgtccatgccgactgtcggttcatcaagtataagcagctccgggttcccggcaagagccaaagcaaagctcaaacggcgtttttgtccgccggataatttttctgctcttgttttcaaatcttctttggtgagtgctgttaacgaaacgagttctttcatggacaatggattcggataatagctccggaagagttcaaggatttcatccaccttaaggcccggcatgacacttacttcctgaagcattacacctattttttcacgaacctgttgatcatcgggaacccggttaaatagtttgatttctccctcactcggtttcagcaatcctaatatcatcgagacgacggtcgtcttccctgccccatttggcccgagaatggctgcaatttctcctttttcaatactgaagctgatgtggtttacagcggtttttcgctggaaatgttttgtcacgttgcttactgttactgcttctttcatcacatgagcacctcctgatcgtttacattgattgtaaaatgacggagaagacgatgttagtatggggtgtcatgatgatggagtgacaaatgtcatttttttctcaccccggtgtctaggcaatcctcctcctgcatcttccaattcatccatcttttctatctcccatgtcctctttcttttaaactgctgtgacattcatagaaagatacactcttcaaaccatccgagtgttatgatagaaatattgaactttatattactttccggctgaaaggagccaatcatgaacgaagcgattttgtctagaaatcatgtgaaggtgaaaggcagcggcaaagcatctatcatgttcgcacctggttttggatgcgatcaaagtgtgtggaatgccgtggcacctgcctttgaagaagatcatcgggtgattttgtttgattacgtcggttcgggacattcagatttgcgcgcatatgacctgaatcgttaccagacacttgacggctatgcccaggatgttcttgatgtttgtgaagctttagatctgaaggaaaccgtgtttgtgggtcactccgtcggggccttgattgggatgattgcatccatccgccgcccggagcttttttccaatctggtgatggtggggccttctccttgctatttgaatgatccgcctgagtattacggaggatttgaagaggagcagctccttggcttgctggagatgatggagaaaaattatatcggctgggcaactgtatttgcggcaaccgttctgaatcagccagatcggcctgaaattaaggaagagcttgaaagccgtttttgttctactgatcctgtcattgcccgccaattcgcgaaagcggcgtttttttctgatcaccgagaggatctttcgaaggtaacggttccctctcttattctccaatgtgcagatgatatcatcgcacctgcaacagtaggtaagtatatgcatcagcatctgccttatagcagtctgaaacaaatggaggctcgcggacattgccctcatatgagccatccagatgagacgatacagctgatcggcgattatttaaaagcacacgtgtgatataggaacgaaagggatagaggtgaccctcttagatggacaaacaattgaatgatgcaccatgcggtttcctcgctttgtcagaagaggggtcgatcatagctgccaaccgcacccttatcaagattctggattatgagccggagcaggttatcggccagcatatgaatatgatgttgacaattcccgcacagcttttctgccagctttatttttttccgcttttgaaattggagcatcacatcgaagaaatatacatttccctgaaagctagagatggagaagaaattcccgtccttatcaatgctattgcgagacacgatagcggggcttctgtctttgattgtgttctgattccaatgcgaaagcgaaatgaatatgaaaatgagctgctgatagccagaaatgaggctcaggaagctttgcttgccaaacagaaagccaatgcggagttagagattgccttggaaacgctgaaagcaaaacaagaagaacttcttgagatcaataaacaaaatcaacaatttaaattaaacaccaaaagagagcttgaactcgccagaaagatccagaaaaactcgttgactgaaccgattgtaaacgatcaggttcagattgactcttattacaacgcatcgagtgaattgtcaggtgatctttacggatattatcaaatcgatgaacaccgttacggcattattatccttgatgtgatggggcacggaatttcatctgcattgattacgatgtctcttcatcctttgttccagcgccagatcacgcaaggtctcagccccgttaaagttatgaaggaattggaccggcaccttcacagcttgtttcaaaatgatgaggaagcaagacattattgcactgctatttatctcgagattgacatagcacggcaaagaattgattatgtcaacgcaggacatccgccggcactttggcaggacgatagcggaactcaacatctgcttcacgcgacttcgcctccgatcggaatgtttgaagacttagtatttcagtcaagcagcctttcatacacggagggcggaagattgcttctgtatacggatggcgtgatggatcctacggcttcatgttatttatatgatttactaaaggatcatcctgattcgccgatcgctgaccagaaggagaaaatccttacatcactgcagcatcaaaaggaagctcatcataagagtgatgacgaatgttttatattagttgatgtaaaataaaatgatccatgagacataacaatgatttgttacatctcatggattttttgtttcagcgtttctttggaatatgtcctgactccgcatattgaaacacctgcaaggaaggcagcgggtgtccattaaaatcaaataaagcttgattatctacagcacttcccccataccacttcccggcgtcttcagggtcgtattcagcagcatagctggacgcccaccctgacccgtatgtttcccataacactttgtttttctctatctgtgttttcggtccgaccggaatccacgcaggctcccagtagaaaacaccaagtcctgctttgcccgtattcgccactgcctccattacatctcttactgcagttgcctggccttgaacagaaattggatatggcagcgtctgcccgctttttggtgctgtatttccatgcccatcgccatcctcggcggtataggtgtacgatgtctccgccaccatgacttttttgccgtacgtgttggcaacagccttcagcacggaggtcaaattttgtaatgtgccatgccagaaaggataataggagctcgcaaacacatcataatccactttgtttttgctgagtgtttccgcaataaatgaataccttccagccgtttcaggattggtaaaatgcagggcgaccaaaatatttgaatttgtctccctgaccgctcggcttccttcattaaataattggcacatcttcgtccaatcagtctcaccggcaaatcctcctgttgtttcatttccgacctgaaccatgccgatgtcaacgccttccttgatcatcttttgcaggctttgtttcgtatactcatagagctttgctttttttgcttcaaagctgagattcacccaggctttgggcaccttttgtttcgctggatcggcccagaaatcagagtagtgaaagtcggccagcaccttcattccgttcgctgtcgctctttttccgatttcgatggctttttgaacatcattgtttcccccgccatacccgttgccatttgaatcatacgggttattccagatgcggacgcgaacatagttgaccccagcctgttttaaggttgtaaagatgtcctgacgttttccgcttgtattataaaaggtgacaccgctgttttccaaagcaataacgctggacacatctgcccctttgataaaatccttgttcatcccctctacttttttaacaaaaagatcctctgtccgaagctctgacacgtgcttgtccttctcaatggcagcggcatatcctgttgaactacatgcactccacacgatggcagccgcaaagaacattttcactttgcttttcatgatttcatccccccaagacttagtaagcagtttcattctatagaaaaaagaatccgcccatatcgagcggagcatcagcctaatgtgtgtttacgacaattctcacttcatacttttccatcgtcaggtcgcctgacaatatgtctcctgtcattatgtccttcacactctgatcaaacgtgaccagttgtttttcttccgtaaagttcatcacaaaaatataatcattgtcctgatcctgcctcgcttgtacggagacgccttttccgtgccgaaccggaaaaactggagaaagagacaggtctgtgatcagaccctcatagaaatcacgctgaaattgatcctccaaacgcgcgccgataaaatacgccttgccctgctgatactcatggcttgtgaccgctggcgtgcgcgcataaaaatcttcttgatacactgcttccactgaagctgtctttacatcaatcacggttgcataatccttcatttcatatatttggctgcgatagctgacagcgtttcgatccttcggatacagggtgtccgtttcaagaggctcaactccaaatatagcttgaaggtccggatgccatccgcctgtgtatgttaagtcatgctcattcacaaccccgctgatatacgtcatgactaaggtgccgccgtcagccgtaaacgcttttaaacgggaaatggtgtcctcgctgattaaatacagcatcgggacgatcagcagtttatatggtgaaaagtcttgttctttcgtgatgacgtcgacagggatatcgtgttcccagaatgtgcggtaatgctgctgaagcgtttgcggataacgttttgtcgccttcgcaaacccctgagcatcctcgagcgcccaatgattttcccagtcatataaaatcgcggtttgagccggcctcttcgttccgacaacttcggacagccgttccaatgtctcgcctaccttggccacttcttgaaagacgcggttctttgggctattgtcatgatccacaaccgctccgtgtaatttttctgatgacccccgtgatttgcggtattggaaatagagtacgctgtccgagccgtgggcaatcatttgcatggatgacagcagattcatgcccgggcgcttcgccttgttgacgttatgccaattgaccgcgcttggcgtacactccattaataagaaagactgctgcttcaagcttcggtacaggtcgttgataaaaccgaccttcatcgctaaatcagctgtgctttcccagtcattgtgccagacaggataagcgtcccagctgatgacatcgacatgctttgcaaatttgctgtagtcgaggccctgatacgggatcaaatccggtgtgtcagccataaaattcgttgtgatagggatatcaggcgtcagttctttcagcggaatgatttcatttttataaaacgaaatcgtttgatcggtgacgaaccggcgccaatctaaattcaggccatgcaagccattttcaccgatcggcgaagggctttcaatttgtgaccagtcattgaacgtatggctccaaaaaggagtccaccacgcatggttcaatgccttgaggctgttgtcatatttcgatttcagccactcccggaaagcatgctggcataaatcacagtggcaatctcccccgtattcgtttgaaatgtgccacattaacagcgccgggtgatgtccgtatcgttctgctaataagcggttgatgtgccgtgttttttctcggtagactttagatgtgaggcagtggttgtgccttccgccgtgcagctgtttgacgcgggaggcattgacgcgcaaaacttccggataggtttgcgacagccaggccggacgggctccgctcggcgttgctaatatgacccggccgcctatactgtgaatccgctcaaaaatatcatccagccattcaaattgatatacaccctcctccggctcaagtgcgctccatgcaaaaatgccgacagaaaacgtattcgtatgagaaagcttcatcagtttgatatcgtcagctaaaatatcgggccgatccagccactgatcggggttgtagtctcccccatggagcataaatttcgcttcggttacgtgcgttttttcaagctttgacatcacattctcctcctttttctcttagcccttcgttccgcctgcggttaatccggacacaaaattcttttgcagcatgataaagatgagggcaaccggtatgctgataagcagggctccggccgcaaatgtcgtatagctggcccccatgacatcattcactaaattgaatagaccgacgggcaatgtatatgattcaggcgttctcaatatggttgaggacagcacaaaatctccgagcggaccggtaaagccgttcatggccacgactgccgccatcggttttgataatggcagaatgatctggaagaagattctggtgctgctggctccgtcaatcttggcgctttcgtctaaatccatcggaatggaatccatgtaccctttcatcaaatacgtattcatcgggatcaggccgccgatataaagcaagattagcagccagtggctattgatcattcccaagatttgcgccagcacaaacaaggcaattaaagccgaaaactgaggaatcatctgcagcaataaaaagagcgttaaagcgtatttcctgcctttgaagcgaaagcgcgaaaacgcataggctgtaaacgtcacacagagcaaagaccctgccattgtaaacaggctgatcttcattgagttgacataccactgcacatattgaaggctttctttgcccgcaaataattccttgtaatggtcgaatgtcggatgcttcggaatgatggatgtactgattaagctgttgccagggttaaagcttgcgcctgccgtccaaaggagaggataaacaatgatgaccgccataaaggctagcaacaagtaagagaaaaggagacggatatattttctgactttcatatctgccagcataccttatgccccctctttaaaagactttgtctgtctgaattgccacaatgcgatggagataacaaatacagataataaaatggttaaagccgcagcaagagaatattggctggactgcattgtcaatttataaatccatgaaacgaggatatctgtcccgccggctgttgatccggttacagccggacctccgccattgaatagatagataatattaaagttattaaaattaaacgtaaactgggtaatgataatcggagccattgcaatgaacaccatcggaagcgtgatgtatctcagctttgaaaagacagaagcgccatcaatcgtagctgcttcatacagatcgtccgggatggattgcaatacgcctgttgagacgagaaagatgtacggaaatccgagccagccctgcatgagaatcaacgcaagcctcgaccaattggcatctgtcatccacggaagcggatctatcccgaagaaagccaagatgtcgtgattcatcgcaccgaagctatcattaaacagtcccgcaaaaattaaaatcgtcacaaaaccgggaacggcccatggcaaaatcagaatcgtccgaaaaaaacgtttaaaccgaaggtctttctggttaacaatgatcgcgagaaaaatccccaagctgacttgcagtgtggatgcagcaagtgtccaaaccaccgtccaagccagtacatcaaaaaaagtcgacctccaaatatcaactgtgaaaatatttgcgaacgtttgaaaaccgacccaatcaattaattttgcaggaggagaatgatacaaatcatagtttgtaaacgctaatgcaaagctgaataagataggaaagatcacggcgaaaattaaaataaacaaagaggggccgctgacgacataaggatagccctcagaaatgatatgttggtattgttcctttaaggaacttaatggcttattttcatcacgctgttttccgctttggaacgcatcgcgaagattcacataatacaccgcaaggccaaagcaggtcacgatgacagcgataattccttccgccagcagaaaaacggaattatcccgcggcacttctgttcccagtgtaaagattccccaaaaccccatattgagcagatctccaaagaccgcaaaaaacgatgcgcctaagaaaagaaagacaataccttttatccattgcttgttataaaattgcccgagtcccggaatgatagaaagcaacaaagcgacttgacgatgctgcaccgttttcacctctcttacaatacaaatctagctttctctttattttccgctgtgctttgccttaatttgtcctttggccgtttcagctgcttgatccaatgcttgtttcggatctgccttccctgttgcaaccgtctgtaatgctgaatcagccggcgtccatatttcattcatttccggaatatttggtgttggctctgagaaacgggattgttcagtaacagcccgtgccgcctcgcttttcataatagccgggtcattggctagggatttcacagcaggaacttctttcgtttcttcatatcgtgttttagaatttttttcatttgccaggaaaacggctaattcttgcgccagttcttcattctttgtaaatgcactaacgttgtagcttttgacgccgataaaggagctcatgtttttcctattttccagcttcggcagtttcgtaatgccataattgattcctgctttcgaaaaagcttctacattccatggaccagaaataattgcggcggcttttccttctgtgaacagcgattccaatacgttaatcccttgttctccaataatgccagccgggaacaggccatctttgtaaaacttctgaatcagcgccgcacctttgacagctccttcattattgattccaatgtctgacgggttatagctcccatctttgtcctttccaaaaatgtatccgccatatccgctcatcacactttctgcataataaatttgatcgaatagggctaaaaagccaaaattgctgccatcagctgtctttttggaatagtcgtaccactcttccagcgttttgggcaattccttttctgtgatgagatctttgttgtaaaaaagcacagtcgtttcgaccgcttttggcagtccataaagcttttgatctaccatttgagactgaatggaagcgtcagtataaagtgattgaacgtcttttttgacatgtaattccttgagtaatccttccgtgacagcggttccgatttggtcccctggcattgttaacacgtcagggcctgtgccggccggtccgtccattcgcaaatcttcaatctgcttggcatacggtttttcaacgactttgaccttcacatcatgctctttttcaaacgcagcaacggcgtctttaatgccgatgctcttttctttatcctcccatacaacaagctctgacccttttgaactcgatttggcgctgctgctttcctttgggccgcaagccgccaaggataaactgacagctgcgcagagcatgaatacggaacacttttttgccattttcattgattgtcaccctttcggtaggaatgaaagcgctttaaagataatatagcacgcttgagaaaatgtgtaaacaaactatttacctcatagagtaaatttttttacttaaataaaaatgacttagtgtcctaagtcattcttaattcatactcttcctgacgattaattctgcgcccacatataatgtttttaccgttcttctcttgtcctgcacttgttcaagcagtaattgaacagcgtttttacataattcatgtatatcaatatgaaacgtcgtcagaggaggcgagacatacttcgcgaagctgatgttgttgatactcacaatgcttaccctgtttggtatagcaattcctttttcgttcagggcttgcagacagcccactgctatcgggtccgctgcaatcataaaagcagtcggaagctgatcgcctaatgtgtcgatcgctgctgacatcaggcggtagccgttttctacagagaatccgcgatgacagaaaatatagcgctcgtccagcatggctttttccctcatataggatctgaaggtttgttcacggatgtccatttcatcctgattggtattcggatttttgtatgtgccgccgataaaaccgatgctcttatgccccttctcagccaggatgtttaccgtcttccttgtcatttgtgccaaatcgggccttaccgagtcaaaatgatcgggatcaggagttgaatcgatgaacacgccgttttcagtgagatttctgaggaaagccagctcttcatctgaaaatgtgccgacggcaataaacccttccgtatgttcaggaatgctctcgattccatccgctattttataagtggtcatatcgacattgaatgctttcgccagtttctctacttctaatctcatcgttttaaaatagacatcttctaattcttctttatctgtcagccaatataaaaacgcaatatgtttcaccagcggccttactgtttttttgcggtaattgagcttttccgccgcttcatagattttctcccgtgtttcatcaggaacagaaaggctttcatcgttatttaaaacgcgggaaacggttgagattgaaaatcccgcttcctgcgcgatatctttaattgtcgccattgcatctgcctccattattcagctcgcattgttttagtaaaatattttactttctttttcgcaaatgtcaagtgcacaaagccctctggctgcctcatgtaaaaagactgaaccatttgcggctcagtctcagttgttcgtatcattcggaaccggcggaattgcccgggaaatgagttggttattgcacattttcctcgaaatatcccgaaagcacatcttccacattcgtcaaatgcgccagcatggcggcttccgcctctgcaccgttcccggcagccacagcattgtaaatccgttcgtgctcctcatacagccgctgaacggaggtcttcttggaaaacagccagattttcctcgtttccctcattgtttccagcagcaatgatgacacgtgattcatcaagtgtttaagaagttcattttgagaagcgtccgcaagcgcaagatgaaatgcaaagtctgctttctctcccagctccccgtccgcttcaatgctgcccatttccttcagggcatcatgaattctttcgagatctgcttctgtccttttttcagccgctagtgaagccacgccgatttcaagcagttttctgacctcgagcagctgcttgacgtcctcttttttcatcagaagggcggctgagagcggctgagaaatttgattgagctcaaattccttcagatacgtgccttctccctgtttcatttcgacaagccccatcgcttttagcgcagaaagtgcctcgcgaaccgctgaacggctgacttgaaagctctcagcaagcgcctgaacagagtccagtttatcccccggcttcaattcgccgtttttgatcatatctaatagtgcatccgctacttcttcatatattttttttgttttaatctgtttgtatttcaatgcaattcaccccgtaacttgtaggtctggctgtttacgatctattatactctgttttgtgggccgccaaaagattttgactattttgtcaaaaagtcttgtactttgatttttttcaaaatataatgctaggtaactggtcttattacccagtcatcagatgatcatatcatctatagaaaccgcttacatatggcgccagtttatgtttcaaggaggggtttgggatgcaatggacacaggcatatacgcctatagggggaaatttgctattatcagcgcttgccgcacttgtaccgattattttctttttttgggcactcgcgattaaacggatgaaggggtatacagcaggcttggccacattggggatcgcccttatcattgctgtattggtttatcggatgccggcggaaaaagcgctgatgtccgcgacacaaggagccgtatacggattgttgccgatcggctggatcattgtgacgtctgtttttttgtataaaatcactgtgaaaacgggacagtttgatatcattcgcagctctgttctctcaattactgatgaccgacggcttcaagctctcttgatcgctttttcattcggggcttttttagaaggggcagcaggcttcggagcgccggtcgccatttctgccgcgctgctggtcggtctcggctttaatcctctttatgctgcggggatctgtttgatcgccaatacggcgccggttgcctttggggcaattgggattccaattacagccgtagaagggccgacagggattccggcgatggagatttcgcaaatggtcgggcggcagctgccgtttttatccgtatttattcctctttatttaatcatcatcatgagcgggttcaggaaagccttggagatctggccggcgattctcgtatctggtgtttcctttgccgttgttcaatatctcagttccaattttttagggcctgagctgcccgatgttttgtcagctcttgtttcaatggctgcgcttgctgtgtttttgagatggtggacgccgaaaacaacattccggtttgccggtgaacaagagtcggccgcctcaattgaaacggcgcgcacaaatccggcggcgcctgcgtacagcggcggacagatttttaaggcttggtcgccatttctgctgctgacggcgatgatttccgtatggggcattccatctgtcaaatccgcgctgaccgggcattatgaaggctctgcggtgttcttaaagtggctgaatgctgttggagaaaaactgactttttccccaggtgtgccttttttgaacaatcagattgtcaatgctgacggtacaccgattgaagcggtttacaagttggaggtgcttggttcggccggcaccgcgattttgattgccgcagtgctgtcaaagttcatcacggcgatttcatggaaagactggggaaccgtttttaaagaaacagtccaagaattgaagcttccgattttgaccattgcttctgtcgttggttttgcctatgtcaccaactcctcgggaatgagcacgacactcgggatgacactcgcgctgacaggttcgatgtttaccttctttgcgcccgttctcggctggctcggcgtcttcattaccggctcggatacttccgccaacctgctgttcggcaacctgcagaaagtcaccgcattatcagtcggcatggaccccgttctgtctgtggccgccaactcttcaggcggtgtcacaggaaaaatgatttcaccgcagtcgatagcggtggcgtgcgccgcggtaggactcgccggaaaggagtcagatcttttccgctttaccattaaacacagtctgtttttgctgctgctcgtttgtatcatcacctttttgcagcatcacgtattcagctggatgattccttaaaaaaatcctcccgtctagggaggattttatttatatcgctttctcgctgccgatgacggaatattcatttgatcgcgatattttgccacggtgcgtctcgagatttggatgccgtgttgttcatacagcaaatcgacaagcttttgatctgaaagcggttttgttttgtcctcttgattgatcaggtcttcaagatgcattttgactgcataattcgacgcatctccctctcctgaagcctcggcttttgctgagaaaaagagcttcatctcaaacagcccgtaaggcgtttgtattgttttccctttaatggcccggctcacagttgattcatgaaggcttagacagtccgccacctctctcagagtcagcggcttcattgcgcttcgccctttcagaaagaaatccttttggcgtgtgatcagttcattgataattctcgtgattgtctgttttcgctgcctcagcgcgcggctcagccagcgccactcctgatatttcgcagataaataggagacagtatcctgacaggagccggatgataaaagcgttctgtactgcggatgcagatcgatctcgggaaacgagcgggtattcagttccgctgcgatgtgcccgttttttacagtgataaaaatgtcaggctcaatatacacatcttgctctggccgggcaaacagaaggccaggtctaggatgaagagccgcgatatcatctgagatatcttgaatagtatgaagcggaattcctgcctccactgaaagcgctttccattttttttgcgcaaaagcatcaaaatgagctgaaaccagcatttccgcttgttcatttctgttcggcagccgctgtaattgaagaaggatgcattcctgcaaagatctcgcgccaattccagccggttctaatgactggagttttgccaaaacagcctccgcttccttggccgatacagataatcgccgtgctgcctcctctatatcttcttccaagtacccgtttgaatcaagcgaatgaatcagataattaaaaatctttttttcagtgtttgtcagattcatatcgagtgactgctgttttaacgcatcctgcaatgttttttgcggattacttaattgaaggcccgcttcctgtgcattcatcctgtttttgtttgttttatggtaagatagtggcggtgtgtctgtttcctttcgttcaataagagggttttccagtgagagctcatcaatgtactcggcgagttctgccgaatgatagccaagcagcgtgatggcctgcctgagctcctgtgtcagttgaggctttaatacttgtacttgctgaagtttcatatccatcttgctcactcccctttcttcattgtacatgattgagatcacaccgtatacatttatgaaaaaggagctgccaaagaaatgtctgaacttttttccgtcccttattttattgagaatttaaaacagcatattgaaatgaatcagtctgaggataaaatccacgcgatgaacagctactaccgttccgtcgtctcaacactagtgcaggaccagctgacgaaaaacgcagttgtcctgaaacggattcagcatttagatgaagcatacaacaaagtcaaacgtggagaatcaaaataaaccttccgctcacatgtgagcaggaaggttttccttctttgaggcgtgctggatgagacgggtgcttggcacgccttccatccaggtatgaaagtaattggcgtttttcccgtaggaattatcaatgaccgtgttttctttttgaagaagagaagacaggatgtggccgtgcaacctcgatgtttccaccgattcgtaacggctgaaaaaccgaatcgctttttggacgatataatccgagtatttttcccatatatacgcaatgggcaaagggttgcctgcttttttattcaagacgttcagcgtttggagaaaagcaatcgtccggcggtctgaagctgacagcaccgtgcgccagtcgtagctttccgcttctgcgtgtccctgaagcgcctggtttgcttcatgatctgttcggataaatctcagtttttgattggacggctgctgcgtgggaatgacgggaaacagctgatgaaccatatcaggcagaagctgaatgtgatttcttgaaaaataagcctgtgccgtagcataggaggctttttcccttgtcataatgtgaaggttcgcatgcttagaaaatatctctgccgtccgtttgaggttgtctttgttttgaaaataaatcgattgcggcaggatcacaattttgtggttcggataggtttggacgattttctctctaaagccttgataatacggatacagatccccgaagtttccgcctccctggcagacgatgatgagatgaggatccagctttcgcccgactggaaaattgtcaggattccagcgttttctgacccgaatcccgtgttctttaaagaaggcttctgttcctttcataataaataaatcccctacattcccatatagaggatagtcagcatatataatctctgattgtttcggtatgacgtcgagcagcccggacagtttctgtttcaggctgatcatcgaatgcttgctgtccatttcttcacctcggcagtttggaataagtgcagtagcacttcaatgacccggtcttgctcatcttctgtcatattggaccccgatgggagacagattcctcgcttgaacaaatcttcgcatacgcttcctgtatcttcatgagaataaaataaagccggatcgaatagcggctgggtatggagcggcttccacagcggacgagcttcaatgttttcttcagcaagacgttgaactacgtcatatgggctgagcccgttatcaagtgtgagcgtggtgagccagcgattggatacgcctgctgcgtactccggcataaagcggacgccgtctatgtgaccgagcgcattgttgtatctcgtgaaaatggtccttcttttctccactcgctcatccagcacctcaagctgggcaatgccgacgccggctaagatattgctcagcctgtaattatgaccaatttgactgtgttgataatgaacagccggctctcgtgcctgcgaagcgagaaatcttgctttttcaattgctgcttcatcatttgaaacgagcatccctccccctgatgtggtaatgattttattcccgttaaatgaaaaaatgccgaagcgcccgaaagttccgctttgcttccctttatagactgtgccgagagattcggctgcgtcctcaatgacaggaactccgtatgcatcacacaggcttacgatttcatccattttcgcgctctgcccatacagattgacggcaatcaccgcttttggcagtgttccatttcttttcacttcctccaatgctctttcaagggctgtcggcgacatattccacgtatcaggctcagaatcaataaagacgggcaccgctttttcatatagaatcggattggcggttgctacaaatgtgaaggactggcaaaacacgctgtcaccttcttttacctcaagtaaacgcagcgcgagatgaatcgccgccgttcctgagctgaccgcagctgctgcttttacaccgactcgttctgccagctgttcttcaaatgaattcacgagcggcccaagcggcgcgatccagtttgagcgaaaggcttctgaaatatagtgctgctccctgccgctcatatgagggggagataagtagatttttttatgcatagaatcatcctttgtttgatgtttgaatggaagaaatgatgcgtgccggagcaccggccgccgttaccctgtccggtatgggacggatcaccgcggagccggcgccgacaatgctccaagccccgattgtgatctgcggtatgacggatgcaccggttccgacgtgagccccttcctgaacggaaaccgctcctgacagcgtggcacgcggagacagatggacataatcgctgatctgattgtcgtgctctgccactgcacccgtattgatgatgcaatgagcgccgatgcgcacatccgcctgaatgatcgcgcccgccataatcactgtcccttccccgatgacagccgacttgctgacgatggctgacgggtgaatcaatgtaataaaatcatctttcctcagacccagtcgctccgccagctgttttctgacactgttattcccaacagcaatcagaaacagcacatcaggaatgagcctgcgcagttcagtaacggcttccggcggtcctgtgtaccattcttttccgccttcgaatgttttgaatttatcatccagcaccgcggctaagcgcgtatctgagcgggcgtttatcagctccctgatcacctttccatgaccgccgtcacccacaatggccacgtttttcatgaggacacatctccgcttccggtaaaccgttccgcggtcacatgattggtttgctgaatcccttctgaaacaaggacctttcgcaccgtcaaacataaaattttcaaatcgagaaaaaatgaccggttgtcaacgtaccaaacatctaattcaaatttcttttcccaggaaatcgcgtttctgccattgatttgcgcccagcctgtgatacccggcttcacctcatggcgccgtgcctgtttttctgtataaagaggcagatagtccatcaaaagcggccgcggcccgacaaggctcagatcgcccttcaggacattcaggagctgcggaagctcatcaatgcttagctttctgatcagcctgcccgttttcgtcagccggacttcatcgggcagcagatttccctcactgtcccgttcatccgtcattgtccggaacttgtatagggtgaacggtttgccgtgcaggcctggccttacttgcttaaagaagacaggtgatcctattttcagcctgacaacggcgatggtgaacagaatgatcacactcgtacagcacaacaaaaaaatggcggccgtcagatcaaaaagtcgtttcaggatcaaagattcacagctcctttcgtttttcgaaaccgttttagtaccagctgtctttcctcttttgtacaaacgagcataaaagcgaaaacagcgtagcaaaagctgactgtcactcccgtcgctatcagtgacggccatccgtcaaccttcacaacgaactgaattgccttacagaccgtccaggcaaacacagcggctgatagaggcccgattatgcctttaaagaaaacgtgctttttgtagcctgtaatgcgggatacataaagcggcgtaaagatggcattttttaaaataagagaaatggcccctgccaacgttatgccgtacagaccgagatgagccggcccgctcagcgtgaccgccagcaccacattcaccgcacctaacagcagggtaacaatcgccggtgttttttgttgattaaaagcggtccatatataaaacagcggcataaaggcgaggctgacaaccaagtatccggcatgaataaataaaagcggtgctatcgttgaaaaggacggtccgagccagattgtcaaaaaaggtcccgccaatccgcccaataaggcagcaggaagtgcaagcaaaagaccattgagccttactgccttattggcgtaattcatcaacccttccatatcgccttttgaataatatgaagtcatgataggcgcaaacagggatgcgaccgttccggccaagctgcgcaaaagcagcggaaactggataatcgccgcgtatttcccggatgcggacgcccccagcatcaaattggcggttaacagatcaatctgcaaaaaaagcaggacgccgatttgattgacggagctccatgcgcccgcttgaaacagctccttgcttgtgcggaatgaaagatccttcatacgaaacgaaaaccacggaatcagctttttgaagaaatagaaagacagcacagacgcaatgacagcaccagctaaagctgcaagctggatctgccagattttcggcgcaaagcatgcaaacaggagcagcacagacagcacccgtataagcatttgcaccgcctgaatggaactggtgatataaaggcggttggcataaaatggtgcagcaccgaaacccgccatcagaaacgttaaaataaacagcacactgccgattaaaatcgacaaacgcacatctgccaaaagcgcttgcggcacattcatgacgcggtcaataaaaaaagccgaacccgcaagcggcagcaagagcagcaatgaaatcaaaacagaggccgctaaataattgctgatatacgcatttgctttctcccgctctcccctgtgggcagcaacagaaaagaaccgaacgacaaccgagctgagcgccacggtaataaccgaaaagtaattaatcacattttgtgtcaagtgaacaaagccaaacgcttcgacaccgagcgttttgacaataaaaggcgtcatccaaaccgataggaaaacagacaagagaaaagccgtgagattcgcgctgaaatttatcgtgaatttcatgcctgcttcgcactgcctttcattgtcccccgctgctcgaaaaacagcttgatgagaaaagtgagccgccatttacacagtgctaataccaaacgctctcctcttaataatttctcatgctgaaacggtgtatgtctgacagcctgccgcaccatgtcataggataaaatctgtctgatcttctttttgatgtctttcggcgaattcggagaagcacaggcatttgccaaaagcatcggaagctggtgcctgcaaatgtacacattcaaatcttcttggcatgcgcctgctaagccatagtgattgtagaatgcgattttagcttgatattgtttttgaagatgttcatccatcgccggcttataagggatttctgtcaggctgttcgggttttcacgataaatgtacaatccttcatcaagcattttcacccgctccgcttcgcaaaaagcggacaaattgaagggagagtcttcagcaaaacggatgtcttcagcaaacagcagattcgccctatcaaaaagctcacggcggtaaagataacgccatacataccagataaatctcgtttcgtgagcatgtttaagctgttcagtcatttctcgttttgtcagcacgcggtttgcctcaagctgcggcggcacatatgtccgcctgtccgatgactgtttgtaaaaaccgcatccgacgatgtcgagccgattttcctccgcttcttcagccagcctctggaacatggcggaaaatacataatcgtctccgtctacaaagccgatgtaagtgccccgcgcggcctttattcccgtatttcgcgctgaactaagcccgccgtttgcctgatgaatgacccggattctcgcatcccgttttgcataatcctctgcaattttgcctgaacgatccggtgttccgtcattcacgaggatgatttcaatatcagaaagcgtttgacgaagcaaagaatcaatgcactcccctataaatggttcaacattatacatcgggacaataatgctgacgagcggggtcattgcgcttcaccgctgattttgtcacgcagacctttaaaatacacatctctcggaaagcctgcacgggatgtttcttttgttaaaagctcattgactgcggctgttacgcgctctggctccggatgttctatcagcttcatgaacgggatgtctttaagccattgatagccctccatcaccttatggtcaaaggagcgaatgacaacacacggcgttcctgtcagcgcgcaaaaaatcatgccatgaagcctgtcagtgacgacggcttctgcgctttgcagcttagaccacagtgcttcaagttcttgttcgcgtgtatcgcggctgacccggcggccgatcgttgtcgtaaaggatttgatctcgccgaattcctcacatagcgcagccttgacccggttcctctggtcctcctgaagcacgctttcctgatcctcgcgcaaacacatataaaccccttcgcgttctgcgggggtcttgcttctatctaaatacagcaccatgtccggctgcttcaaaattgttttttcttgaaaatgctgtttcataaattgatacgttgtttcatcccgcgccatcagcaacaggccggggtgcgcattataaattttctgtgcccgtttcagctctttgcgcccttttttcgtgtcagaaaaatgagccgttgccggaagctggacaacccgatagtcatggaatgttttaatgatgaagcggcgcgtccactcctcataacggtataaatcccccatatttccgccgccgatgataaagaccatatcctccggatggcgcgagcggatcaggttttttgctgatttgtaaatgtccttcatatcgacctcgacgatgtcaaagtccgggtattcttgctcaagaaatgccttgctggcataagcaattgcgtgatctcccaaattgtcatgggacggcagcagggtcagtatgatttttttctgatgtgctgcggcctttaccggttgatctgccgctcccagccaatattgggacgggtatttgacctttagcagcagccattctgcaaaattgattttcaacgattgtaacgacatgtcctcaccctctgtttctcattttgtactcgatcacccgctgatacatagccgatgccatagcgacgaacggaatcattctgtatttcgccatcagaagcaggcatgaccgttttgcgtcaaaaggagcggtacccgtttttgaaagactttcttgaaacaccgggtccgcgcatatcacgccaacatttctaagcttttcaaacagtcggcggctgccgctcgttttccattcattcagcatgcagatgctgctgtgaagaacgataaaggtatcaagctccttgcgatactcctccagtttgttgttctcctgtaaaaacgccgcattcgcctcatacagcgcaagtcctgattcaaacaattttttctgatagcgctgcacaatggaggaaaggtgaattcggtaatgatagagcggcgtttttacgtaggatactgagcgggcgaaaaaatgagccctgaagctgaaaaactgatcctcgacatgctccagctcgcctcggagcggaaacgacagccgatgggcttcaatcatgcttcttctgtacagtttgttccatgaaaaccctctgaccttcccttcgaataatgccttgatatagtgctccttcggctgatcctgataggtttgggcaatgtctgagtccatggttttgccagtgtcctcaaactctgcggcgtaattgcaaatgaccagatcagtttcatcgcctgctgcccggagcatctgctcgcaataatcaggttcgatccaatcgtctgaatcgataaacgcgataaattcgccgcgtgccgcttcaatgcctttattccgaaccgcaccgagtccctggttttcctgatgaatcaccttgaacctgttgtccattttggcgtattcttctgcgatatccgggctggcgtcagctgaaccgtcattgacaatgatgatttcaatattgtccactgtctggttccgcagtgattcgagacacgttctgatatatgtttctgtgttataaacagcgactaacagactaaccgcaggtgtttccataatgaccggctcctcgtgcataaattaccgggaaaaaatcgttctgtaaggcagaaccgatgaatcaaccggcataagcaaataactgtaaagaaaataacaaacaacgatagcgatatagataagggcgttcgatttttcatcaaatatcctgacaaaataagggactaagatcatttgatacagaccgaaataaatattgaatctggcaaaaatcacgtcctttgtggccaaaaggccgaacaaaaaaccaagcaggcacaaattgacgacaatatcgatttgcggccacagactccgcaatcgttctttatagcaaaatgcaaggaacagcggcagaaccaaaacagcgattttgatcacattcattccatttgtgttcgtcatgagccatttttcataatggctgtatgagctgttttcaagtacaacgacaaacacagaaataaatttttgatataaaaatgtcatgccgagaaataaagcggataggccgaatatcgccggagaccaggcttttcttctgacaataaagtacaccggaatcataatcagcgccgacgaatgaaagagcgagctgacgagcacaatcaggaaatatcgcttccagttcccgctgatgatataacggatcgcccaaaacaaagcagctgccaccatgtattgcctgatgccgttaaaagacgcgtagtaatgaaaggttcccaaaaacaaaaagacactcagctcaaacggcctgccatagtcggcgagtgtcttcataataaagctgtaggtcacgaccgccaccgtaaaatacatgatttgaggatcttccgtgatgaaattcatcagccaaaggagtgcggtaaaccccggatctgtcgctgttttcgctgtgccgaaaccgaatatctgccacacattttgataatcgcccgccaattcgtacagcagcgtgtacgtctgaaaatccgtgccgactcgatagcggagacctgacacgagcacaagtgaagcgagcggaatccagatcaaaagcttattcggccgataccccgtggcaagcgaatcgtcacggccgccgcacattttagcgaaccaagaccaaataaatacaatccccatattgacggcatatacaatcatcggttatggtccttttccgtgctgatgttgtatacattcagcagcgctcctacattttgctgtgcatcgtagccaagttgagcgagtgtttctttgatgaactcacgcttcggcctgcctgcggcggccgcccttgcaatggtttcagcccagacgctgatcggttcagaaagacttaatcttgtgacaagcccgagaccggcgtcgactttttctgtaatgctgcctgaaatgatgcatggaagccccgacgcctgcgcttccacaagcacaaccggcaagccttcgtacagagacggcatgacaaacacatcaaatgtgcgcatcaattcatggatccgttcttcagtgcctaaaaagagaacatctgatagcagattctgccggcgcgcctcctcctctatctccccgcgcaacggcccgtctcccgccagaacgagctgaaagcgaacgcctctttccttgagatgtgcggcaagcttcagcaggaacgcgtggtttttcacttcatgaaaccgggccacatggccgatgatgagccggtcggctgcaatgccgcgtgctgctttttcttcatcagccgcctgcccatttggggcgaacaactcaaggtcaatcccgttaggaagaaggtgaacacgctcccgctccatattggactgtccaaataaaaacctgcccgcatcctctccgcaggcacacagcgctgtcgcatttgccaaaatgagccgcctgaacacgagcagctgcaagcgatccttccagttgaagccggtcttccaagacgtattgtgggaatggcataccctgaccggcactccggcgagccttgccgcaagggcgataaaacccgtttggaaatccgtgtgcgcatgaacggcgctgaacggcccgttttcttttatcgcttttctcacattcctcacaaatgtaaggggattgctttgcccaatgctcgggacataaaaaagacgcccgcctaaagataaaatctcttcatcataagcgcacggatcatttcgatacgttaaaaaatcaaattgcactttgcttttgtccatcttccgatataaattcattaccatggtttccgcgccgcccctgttcatgccactgagaacatggagtacgcgcttttggctgctattcatgcttgacaagcccttccttttggttcatcactctttttttatggtagcgattcatcacggctgcaggcataaacgcgcggattaacggttttgcgatatatatgtaatcagataaaggaagcttcaagcgtctgcacgcctgatagacaaggatggcattgtcaattgaatacgtaaatgaccgccgtttgaatgcatcgctgtcttccctcactttatacaaggcttcctgaagattatagcccctgaagccctcttcaaaaaagcgaagccacaaatcaatatcttccattcgtctcgtccgccgcaccgaccggtagcctttcagcgtgcggtaggcactcgctctcatcataatcgtgccatggcaaaatggggtcccttttgccatgatgcccggctccggaacagaaggcagaatgcgggcgcctcttacgccaaattcatcaaacacaagcatgccggtgccaaccacctgataatgtcggtgcttttctaaaaacgcgacctgcttttccagacggcgcggaaacgaaaggtcatctccatcctgacgtgcgatataatcgcctgtcgcatgcgaaagacaatgatttaatgatgcggcaagccgcttatttgttttgttttgaatcagtttgatgcggtcgctgtaatgagcggcatactgcttcgcgatgcggagcgtgccgtctgttgacgcatcatcgcacaaaatcagctcccaatttttataggattggctgagtatggattctatgctttctgccaaagtgcgttcgcaattataaatgcccataatgacagaaactttcggtcctgagttcatacgcttttctcctttgtatccatatccatgtacgcggaataaatatctgccatttcttccaccgttcgcgcctccgagaagcgcaaggctgtttttcggccttcctgtcccagctttcggcagagctccggcttatggtaaagctgttcaatccggcgggcaaaagcagcactgtcaccgattttgaccagaaaaccgttttctccgtcgcgaatgatttcccgatgcccgcgattatctgtggcgatcgccggtttttctgccgccattccctcaagcacattcataccgaggccttctctaatgctggatgcgacagatacatccgcaagctgaatcaactcatgtatgtcgctgcaaaagccgtaaaaacagacattggcggaggcaccaagcttttcagctaacgtttgatacgtatgttccattgccccttccccggcaaacacaaggcggagtgagggaattttttcttttagcaaggctgcggcttcaattaactgcttctggtttttgttcagattgagctcagccggataaaccaatataaaatcatcttcacggaacccgtgcttttctctgagtctttgctgctctatcggactgacaggccggaaacgctcggtgttgacgccaatgccgtgaattttctgcgtccttccgcccggcctttgaagtcctttcgcccgtatgtaatcctcttcattaatcgtaatcaggcagtctgtatatgctgaaagccatttctcaaccggatagtaaagaagccaatttttcatcggtgcccctttgcagaagtgaaatccgtgtgctgtgtacagcacctttgttccgtgccgccgtgcctgcctcgccgccagtctggcgagaacgccgccgaccggtgtatggcaatggacaatgtcgtattcataggtgtcaatcactttcttcagctgcctataaacggccaggttctgagggtcaaaaggtgacctgcgaatcgggatggagaatttctcatccacatacggcagcttggtttgtccgttcgcagcgacatgaacctcccagcccatttgtttgaaccatttaaaataagggaggtgaaaggccttaaaatgataatcaacagtcgcgcaaaacaatatctttttcgtcattttcactccccctaatgaacgctggcagccgtcatttcttctgatgtattgattgccgcaaacagcctcgctctcaggtcggcttccggcagctcatgaaaatcctcgataaagcgcatcagcaccggccaatcgccgtccaccgctttaccgatgtgaatttttggaaagatttgttcagcatggacttcatttttgttcagcaattcttcatacattttttcgcccggacgaatgcctgtgaattcgattggaacctgctcagtcgtgtagccggacaaatgaatgaggtttttggcaagatccacaatctttacgggctctcccatatcgagaacgaaaatctgacgccctttcgccagtgccccagcctgaatcacaagccttgatgcctcgggaatcgtcatgaaatagcgggtcattgccggatgtgttactgtcaccggaccgcctttttcaatctgttttttgaaaattggaatgacgctgccgcggctcccgagtacattgccgaagcgaacagcgacaaatttggttctgctgactttcccaagattcataataatcatctctgcgaatcgttttgtcgcccccattacgttggctgggttcaccgctttgtccgatgaaatcagcacgaatgtctctgttcccgacatatcggctgcttccgcgacattttttgttccgataatattgtttttgaccgcctcttctggattgtgttccattaaaggcacatgcttatgggcagctgcatgatagacaacatgcggctcgtattttttcatcaaggtaaacattttatcgcggtcctgcacatcagcgatttccgtatggaacacaatgtgtttgccgaatcgtccgttcagctctgtataaatcgaatgaatgctgttttccccatggccgagcagaatgatttccttaggctgaaacgcgctgatctgacgacagatttccgagccgattgatccgcccgctcccgtgacgagaactgtttttcctttgatgcggttcgaaatttcgctagtgtcgagggttaccggctttctgccgagcaagtcctcagcttttacatctctgatttgtccggcagttcgtgtgccaagcagcatttcatcaaaatgaggcataattttaatgtttactccggttcgcacacattctttatataacacctgaagctcatgggtgcggagtgaaggaatggcaataataatataattaattttgagcttttgcaccgcaggcatgatactttcttttccgccgattacgggcagccccataatttctaatttatgcttcgtttggtcgtcatcaataaaagcgacaggtatgatatcaggttcatctttcgaaagcagctgcctgaccatcagagtcccacctgagcccgccccgataatcagcgcgcgggacgaggcgcagcgttttttcctgatgctttcgtttaatactctggataaaatacgggtccctccaatagacaaaagctgaagcacccagcacgcggttaacagacggaagaacatcgtgtgatacacagcatactgaatgacgccggtcacagcggctgaaagcgtaatgcccttaagcaggacaatcagctcgccaagcccggtgtatgtccacacctgtttatactgattgaacaggaaagcacacacatgatagctgagaagcaagctgacagcagtaagcagtaatgctccggagtcataaaattgataggaatcttttaaaaattgatatcctgcaataactgaatttaaaacgaggtaagtatccagcgcaataatcattgacagtcttctccggtaactcaaccttttcccccctaattcttttatcggtttagctgcggcggttttcgtctctccaaaaaatcggcagcagctaaaccgacaacacgtcctatgtatatatcagataagtgggcatttaacccatcctcacgccccgccagcgacgaccagcatctaaggcagcaacttcagctgcccacagcagagccgagtgcctccattgatacaggtcaggagacatcacctttacaaaaactagtaggaatagtgttccgattttttcattttctttttgtttaaaagagcgcctaacagcttcgcattggattgttccagtgcatcctttgctttcagaacggtatcggtttttgtttttccgcttaaaacgacgagcacgctgccgtctgtctgatttgctagaatctgagcatctgcaacagccaaaagaggaggggaatcaaagatgacgaggctgaattgttcatagatctcagatattaaatctcccattgcttttgaagacaacagttctgccgggtttggcggggtcggcccgcttgtcagtacatataagttatcgatcggcgtcttttgcaccgtctcactgagtgaagcattgccgaccagcacatttgtcagcccggttacattatcaacctgaaacgtctgattgatggtcggctttcttaaatcggcatccaccagcagtactttcttttcctgctgctgcgcaaagacagccgcaagattcgctgcactgaacgatttaccttcaccaggcacagaggaggtgacgaggatagatcgcaagttggtctggacagatgagaactcaatgtttgtccgaatggtgcgatattgttccgcaacaactgatttattgtgtaaaacagatatttgagccaaacctcgccttgctttcttttttctaaagatcactcgcttcactccccgaaatgttttatcccacgattccgccctttgtggacatcaggaacggagcctaagcatggcaatccggttctctcgctgagctgccgtgcgcttttgcaagtatcatcgagaaaatgcagaaaaaatgccagtgtaatgccgcccatgacagcagcgccaaaagccatgaccatatttcgcagcctggccggcttgatcatcgggctttcagaagccttcgcctctgataatatatgtacgccttgtacattcattctttcatctacttctttttcaaacttgttcactaacgtgttcgcaatctcagccgctttcgccgggtcgtgatcctggacggcaacgttgataatttctgattcattttcactgctggtaaccacttttcctttcagcgaggaagccgattcagataggtgcaattccgccttaacttcttccatcaaggcagtgcttttcataatcgattggaacgtgctgctatactgaagatttcgctggatgtcactgagattcgagttttcttcaccgtctgattcatgaaccagcacctgtgtcgacgcctggtaggtcggtgaaatgaccttaaattgcacaaaacccataataagggtgacgccgattgtgatgagcagaatcagcacgaatctgtgtctgacaatcgcatataattctttgaaactcatattctcattcatgtattcatagccttcagccttcccgcggctggcttcccgcgcccctttctgttaatgattggattataaaagaaaacgttattatttaaaaattgcaaaataagccaataagttctctttagagaacaaaatcatgattttcctctaatttactgcacttcccttattattttaaattttataaagaacgaaaaattctttataatgaacaaaataacgacaggaatagaggagaatttcatattatgattggaagaattatccgtttgtaccgtaaaagaaaaggctattctattaatcagctggctgttgagtcaggcgtatccaaatcctatttaagcaagattgaaagaggcgttcacacgaatccgtccgttcaatttttaaaaaaagtttctgccacactggaagttgaattaacagaattatttgacgcagaaacaatgatgtatgaaaaaatcagcggcggtgaagaagaatggcgcgtacatttagtgcaagccgtacaagccgggatggaaaaggaagaattgttcacttttacgaacaggctaaagaaagaacagcctgaaactgcctcttaccgcaaccgcaaactgacggaatccaatatagaagaatggaaagcgctgatggcggaagcaagagaaatcggtctgactgtccatgaagtcaaatcctttttaaaaacaatgggaagatgatgatcggttaagggctaacgttcgcatctatagggtaaatctgtttataatgggggaaaaagggagagaacacaatgactcatcaaatagtaacgactcaatacggcaaagtaaaaggcacaacggaaaacggcgtacataagtggaaaggcatcccctatgccaagccgcctgtcggacaatggcgttttaaagcacctgagccgcctgaagtgtgggaagatgtccttgatgccacagcgtacggccctgtttgcccgcagccgtctgatttgctgtcactttcgtatactgagctgccccgccagtccgaggattgcttgtttgtcaatgtatttgcgcctgacactccaagccaaaacctgcctgtcatggtttggattcacggaggcgctttttatctcggcgcgggcagtgagccattgtatgacggatcaaaacttgcggcgcagggagaggtcattgtcgttacactgaactatcggctggggccgtttggctttttgcacttgtcttcgtttgatgaggcgtattccgataaccttgggcttttagaccaagtcgccgcactgaaatgggtgcgggagaatatttcagcgtttggcggtgatcccgataacgtaacagtatttggagaatccgccggcgggatgagcattgccgcgcttctcgctatgcctgcggcaaaaggcctgttccagaaagcaatcatggaaagcggcgcttctcgaacgatgacgaaagaacaagcggcgagcacctcggcagcctttttacaggtccttgggattaacgagggccaattggataaattgcatacggtttctgcggaagatttgctaaaagcggccgatcagcttcggatcgcagaaaaagaaaatatctttcagctgttcttccagcccgcccttgatccaaaaacgctgcctgctgaaccagaaaaagcgatcgcagaaggggccgcttccggcattccgctattaatcggaacaacccgtgatgaaggatatttatttttcaccccggattcagacgttcattctcaggaaacgcttgatgcagcgctcgagtatttactagggaagccgctggcagagaaagctgccgatttgtatccgcgttctctggaaagccaaattcatatgatgactgatttgttattttggcgccccgctgtcgcctatgcatccgcacattcccattatgcccctgtctggatgtaccggttcgattggcacccggagaagccgccgtacaataaagcgtttcacgcattagagcttccttttgtctttggaaatctggacggattagaacgaatggcaaaagcggaggttacggatgaggtgaaacagctttctcactcgatacaatcagcatggatcacattcgccaaaacaggaaacccaagcaccgaagctgtgaattggccggcgtatcatgaagaaacgagagagacgctgattttagactcagagattacgatcgaaaacgatcccgaatctgaaaaaaggcagaagctattcccttcaaaaggagaataaatatggggaaaacaggatacattggtgctgccattgttgtggcagcttgtatcattattttgtcggccgtggtatgtttacgggacacagtctattaccagcctatgcgctggactggcatcatactgtttttcgtgggaattgtgatggttcccgcatactcagcaaaaagaaaacccggaaaagagaagtaattctcttttccgggtttttatgtttattataatcttcccgcgcgaatatcgtctgtcattccctcataaggagccttcgaaatcacttcttcgttgtcgactccttcatttttcagaaatgtaatttccgcaaattcaggtacaacgtattttggatacgtttcatatttttcgcgggattcttccatcaaatcaatgtggtcattttggtagcaaaccgtaatttcaggatgttcatgcacccatttcgggaagaaaataatgccgtgcatgcgtttttcatttggcataaagtttaatgaaacatccgtgccagtcggctctgtccaagacactttatatacgccttctgtcagtttgacaatattcacttcctgatcccgaacccagcgtccggcaaccattccgctatgaattctataatcaattgtatggtcatttttaatataaatctcgtattcccagccgttttcatacgtataaatcatgtggcttccgataaagttttccatttttcacactctccttagtcttttactgcacttcataaatgtctagtcgaacgtaatcaggggttctttctgcggaaccgataaacaagcggtcatggagccattgatagactttactgcctgtttcaaacgtcggtaccgtacgaaaataaacatgctccggatcaatgatttccccggctgccgcttgttttcgaaacggctcgctgacttgccgtattccattgttttcaatgtaaatcagttcatgatctgctgtttcgatcacatacctggcagataaatcgtttctgccgtcagcgcgaatcatttgcgaatcggcaccgctcggcaaaatacgtccctttacttccccggttattgttcccgaacgaatcggaatgaatcgtctcagtcccaggcctgtctcaccaatcgtgataggcggatcaaccttgatttctaaagaggcgaatggttttaaaaccggcttcttcacgagaaccacctcacctccagaaaaaatcatgtaactatttacatgtttaatttaacactattgcagttaactgtcaaacaataggaacataaaaaaacaaggactgtttgaagacagtccttgtctgaagctagctttgataagcaagatatgtgctgacagtgcttttggcaagacaggcagaggaatctataatcggaatctcactttgaatatgatctaacaccgcatttaaatccgtgcaggctgaaatgatgatgtctgcatgctgactgatttcttcatatagcgtctgccacaatgcttgtgtatgctgcatatgatttggctgtttgattgcggcgataagctggttcacagcctgctgccaatggtccttgtgaacaacttcttgtccatttgccttcagaactttttggtagatggcggattggatggttggctctgttcctaaaaccaccgctttttttgcaggatgcggaatctcttttatcgtttcctcaacgatatgcaacataggaaccgacaatgcctgctgaatctcttcatagtagacatgcgccgtattacaaggcagcgcaatgaaatccactcctgttttctcgagctttaccgctccgtcgataatcgcttttttcatctcgtcatggtcaattggacgatctgcatagaagggcgtcgggcatgaatagatcatcatgtgcgggtagtcaatatcgtttgaagccccatacagcttctgacagtaatcaatcaccttatcaataaacggcgaggtcgatttcggccccattccggctaatattccgatcatcaaattcattcctttctaatttgtacggaccgcttcttcttctgagccatcctcatagaggataaagcttttcgcagcatccccgcctaacataaactcgacttcaacagacaatgctcgcagaaagaaacgggtttccgaggaaggaaataactccagtctcagctgtccggtgatctccaaataaagccgttcattctcggctgtcacctgtgcagccgttccatcctgcaacaggtagctgccaacatagcggctgtatatcgccgtatcaattgcttttttctttttatcagcaggacgttccgggacctcatatggctggccaaatagaatatgttccgccgccttcagaatcgcttgttcatattcagtatcctcttccttattactcaaatagatcagtgttttacgatgatcgatatatcggatcatcaacgtcgaatagccgggccatcctccgctgtggctgacaatccgccctttttcaggactattttgcagtacccagccaaagccataatcaattgtttctccattgttgaggcgcactggagaaaacgcagattccttagaagccttgctgatgaaatcgtcctgatataaagcctgatcaaatcgaaacaaatcgcttgtgacagagttcaccgtcccatctccctgtatgccatcgagatacacaacatagttcgtttcctccagctcatcagggaggacgtatgtttcggaatgtacatcatacacatatccatatgcataatgatcaattcgctcaggcgaaagcctcctgttatacactcttgtttcattcatgccgatcggtgaaaaaatacttgttttcataaaatccgcatagctcatgccagatgctttttcaatgataaccgccagcagcacataccccgtattgctgtacatccagccttcattcggttcaaaataaccagatagcccctcattcatcagcatatcgacaatatcctgattcaccgcaatcttgtgtgaatcccaattggcaaaaaaccatcccatataatcaggaagccctgacgtatggttcaataaatgccgaatcgttacgccctgatacggaaaaccgggcagccagcgatccactttatcctcatagccaagaatccccttctcctccagcaagatgattcccaatgctgtaaaaggctttgacaaagacgctaactcaaacaaagagttggttttcaacgggcgtttttccgtcatttccgcatagccaaaagagtggtgatataaaatatcgccaccctccgcagccagaaccgtcccgttaaactgatgtttttcgcctaatgtctcaaataatgtctgaagatgctttcttttattctgtttcattcctccacctcccatatctctgtacgttactaacctactaacgtttcaaatattttgaaaaacccttcagttagagatcctttttaacccatcacatatacctgcggttcactactatttagtgaaatgagatattatgatattttctgaattatgattaaaaaggcaactttatgcccatgcaacagaagctataaaaaatacagagaatgaaaagaaacagatagattttttagttctttaggcccgtagaccgcaaatccttttatgattttctatcaaacaaaagaggaaaatagaccagttgcaatccaaacgagagtctaatagaatgaggtcgaaaagtaaatcgcgcgggtttgttactgataaagcaggcaagacctaaaatgtgtaaagggcaaagtgtatactttggcgtcaccccttacatattttaggtctttttttattgtgcgtaactaacttgccatcttcaaacaggagggctggaagaagcagaccgctaacacagtacataaaaaaggagacatgaacgatgaacatcaaaaagtttgcaaaacaagcaacagtattaacctttactaccgcactgctggcaggaggcgcaactcaagcgtttgcgaaagaaacgaaccaaaagccatataaggaaacatacggcatttcccatattacacgccatgatatgctgcaaatccctgaacagcaaaaaaatgaaaaatatcaagttcctgaattcgattcgtccacaattaaaaatatctcttctgcaaaaggcctggacgtttgggacagctggccattacaaaacgctgacggcactgtcgcaaactatcatggctaccacatcgtctttgcattagccggagatcctaaaaatgcggatgacacatcgatttacatgttctatcaaaaagtcggcgaaacttctattgacagctggaaaaacgctggccgcgtctttaaagacagcgacaaattcgatgcaaatgattctatcctaaaagaccaaacgcaagaatggtcaggttcagccacatttacatctgacggaaaaatccgtttattctacactgatttctccggtaaacattacggcaaacaaacactgacaactgcacaggttaacgtatcagcatcagacagctctctgaacatcaacggtgtagaggattataaatcaatctttgacggtgacggcaaaacgtatcaaaatgtacagcagttcatcgatgaaggcaactacagctcaggcgacaaccatacgctgagagatcctcactacgtagaagataaaggccacaaatacttagtatttgaagcaaacactggaactgaagatggctaccaaggcgaagaatctttatttaacaaagcatactatggcaaaagcacatcattcttccgtcaagaaagtcaaaagcttctgcaaagtgataaaaagcgcactgctgaattagctaacggcgctctcggtatgattgagctaaacgatgattacacactgaaaaaagtgatgaaaccgctgattgcatctaacacagtaacagatgaaattgaacgcgcgaacgtctttaaaatgaacggcaaatggtatctgttcactgactcccgcgggtcaaaaatgacgattgacggcattacgtctaacgatatttacatgcttggctatgtttctaattctttaactggcccatacaagccgctgaacaaaactggccttgtgttaaaaatggatcttgatcctaacgatgtaacctttacttactcacacttcgctgtacctcaagcgaaaggaaacaatgtcgtgattacaagctatatgacaaacagaggattctacgcagacaaacaatcaacgtttgcgccaagcttcctgctgaacatcaaaggcaagaaaacatctgttgtcaaagacagcatccttgaacaaggacaattaacagttaacaaataaaaacgcaaaagaaaatgccgatatcctattggcattttcttttatttcttatcaacataaaggtgaatcccatatgaactatataaaagcaggcaaatggctaaccgtattcctaacctttttaggaatattgctgtttatcgacttatttccaaaagaagaacatgaccaaaaaacaaaatcaaaacagaagccggactaccgggctgcatatcattttacgacgccggataaatggaaaaatgaccctcaaaaaccgatctattttgatggcaagtatcattatttctatctatataaccgggattacccaaaaggcaacggcacagaatggcgccatgccgtctcagaggatttggtgcactggaccgatgaaggcgtggcgattccgaaatatacaaacccggacggtgacatttggaccggttccgtcgtggttgataaagagaacacagccggctttgggaaaaatgcgcttgtcgcgattgtgacacagccctcagccaaagacaaaaaacaggaacaatatttgtggtacagcacagataagggaaaatcattcaaattctacagtggcaaccccgttatgcctaatccgggtacagacgatttcagagatccgaaagtcatatgggatgaccaggataacaaatgggtcatggtcatggctgaaggatcaaaaatcggcttttatgaatccgataatcttaaggactggcattacacaagcggattcttcccagaacaggcgggaatggtggaatgtcccgacctctacatgatgcgggcaagcgacggaacgaataagtgggttctcggtgccagcgcgaatggcaaaccgtggggcaaaccaaatacgtacgcctactggaccggaagcttcgacggaaaagaattcaaagcggatcagactgaagcccaatggcttgactatggcttcgactggtatggcggtgtgacgttcgaagacagcaaaagcacagatccattagaaaagcggtatgcgcttgcctggatgaacaattgggattatgccaacaacaccccgacaatgaagaacggctttaacggcacagattctgtcatacgcgaactccggctgaaggagcaggatggaacatacagcctcgtctcacagccgattgaagctttggagcagctgactgtttcaactgacgaaatagaggatcaggatgtgaacggatcaaaaacattgtcgataacaggtgatacgtaccagcttgatacggatctttcttggtcagagctaaagaatgcaggcgtcaggctcagagaatcagaagaccaaaaacgccatattgatgtcggtattttcgctgaaggcggctatgcttatgtcaatagagcagccacaaatcagcctgacaaaagcaatacctatgtcgaaagcaaagctccttatgatgtaaacaaacgtaaggtgcatttgaaaatacttgtcgataaaacaacgatagaagtatttgttggcgacgggaaaaccgttttttcaaatgaagtcttcccaaagcctgaagataaaggaattaccctttattctgacggcggcacagcctccttcaaaaatataacagtgaaacactttgattcgattcatgaataaaaacaggggcagcgcaggctgccctgtttttttattaggagcggtattctctgttacatattgggcattgtaagaaatataaggctggtttcaaaggaggaagcgaatgtctaaacaaggaaattttcaaaaatcaatgtcgctgtttgatctgattttgattgggatgggagccatctttggatcagcgtggctgttcgctgtcagtaatgtcgcttcaaaagcagggccctccggcgctttttcctggatcctcggaggagccattattttgttaatcgggctcgtatatgcggagctcggagccgctctgccccgtaccggaggcatcattcgataccccgtttattcacatggccaccttgtcggctacttaatttcgtttgtcacgattgtcgcttatacaagcttgatttcaattgaagtgacagctgtgcgccagtatgtggcctattggtttcccggcctgaccattaaagggtctgattcgccgaccatttccggctggatcttgcagtttgccctattatgcttgtttttcctgctgaattattggagcgtcaaaaccttcgctaaggcgaatttcatcatatcgatttttaaatatattgtgccgattaccatcattattgtgctgatctttcattttcagccggagaatttatccgttcaaggatttgcaccgtttggatttacaggtattcaggctgcaatctcgacaggcggcgtcatgtttgcgtatctcggcctgcacccgattgtatctgtagcaggtgaagtccaaaatccaaaacgcaatatcccgatcgctttaatcatttgcatcatcgtttcaaccatcatttatactgttttgcaggtcacctttattggtgcaatcccgacagaaacactgaaacatggctggcccgcaattggccgggagttctcattgccgtttaaggatattgcggtcatgctcggattaggctggcttgcaacgcttgtcattttagacgccattctgtctcccggaggaaacgggaatatctttatgaatacgacatcccgccttgtttacgcctgggcgcgtaacggcacattatttggcatattctcaaaggtcaataaagatacggggacaccccgcgcatcgctttggctttcgtttgccctgtccattttctggacacttccctttccttcgtggaatgcgctcgtcaatgtctgttcagtcgcgctcattctttcatatgcgattgcacccatttcttcagctgcgctgagggtcaacgcgaaggacttaaacaggccgttttatttaaagggaatgagcattatcgggccgctttcctttatatttacagcgtttatcgtgtactggtcaggatggaaaacagtctcctggctgctcggttcacaactcgtgatgtttttgatctatctctgtttcagcaaatatacgcctaaagaagatgtcagcctcgctcagcagctgaaatcagcctggtggcttatcgggttttatattatgatgctgatcttttcctacatcggttctttcggacatggtttagggattatcagcaatcccgtcgacctcattttagtcgcgatcggctcacttgcgatttattactgggcaaagtataccgggctcccaaaagccgccattgattacgataaataaagaagcaagaggttttcttgcttctttattctttacaaacatacatacacgcgataaaatgaatgagagtcagtcattatcggaggtgttcctcatgccaaaacaaacatcgggcaaatacgaaaaaattctgcaggctgccatagaagtcatttctgaaaaaggcctcgacaaagcttctatttctgatattgtcaaaaaggccggcactgcccaaggaacattctatttgtatttttcatctaaaaatgccctcataccggccattgcagaaaatctcctcacccatacacttgatcaaatcaaaggtaggctgcatggggacgaggatttttggaccgttttagatatattaattgatgagacatttctcattacagaacgccataaggatattattgtcctctgttattccgggcttgcgatcgaccactccatggaaaaatgggagacgatctatcagccttattattcctggcttgaaaaaatcatcaacaaggccattgcaaaccacgaggtaacggaaggaatcaattcaaaatggacggccagaacgattatcaacttggtcgagaatactgcggaacgattctatatcggatttgaacaagatgaaaatgttgaagtgtataaaaaggaaattttcactttcttaaaacggagcttaggtactgcttaaaaaatgactgggtaacaccgctcattttttaatgccctaaaaatgactgacgttcattcataaaatagagaggtgtttcatttgaattgggttcttgtttttattgcagggcttttagaagttgtttgggcctcttccctcaaacatgccgattcgcttttggattggatcatcatttttatcttaatcgcggtcagctttatcctgttgatccgctcttatcaaaaaatcccgatggccgcggcgtacactgtgtttgtgggaatcggaaccgtcggaacatatctgactggaattgttctgggcgaatccttctcagcagcccaaatgttctttttagctttattgctggctggcattttaggaatgaaattatttacgaaagaaagcaaatctcagccgggaggtgaacaataatggcatggtttttattagtgattgccggcatagaagaaattatagctgccattgccatgaaatatatagacggaacaagaaaaaaatggccaatcattgtgatgactgttggattcggcttatccttttactgcctttcccaagcgatgatcgtcctgcctgccggagtcgcatatgccgtctggactggcattggaagcattggtgtttcggcggtcgggctcatctggtttaaggagcggtttcagctttcacaggtgatttcactttgccttatcctagccggcgtcatcggcctgcgtcttacgtcatcttcataaaatcaaggcatatacagctgtatatgcctttgccattaagcttcgtgatgtttttgaagatgaagcggcggtgggatgagccagcctttgttttttagcagccttaagtattttgcgccggttgccgctttcgacatatgaaattgcccaaacatcatggcaatatcctcacgaatcgattgccccatcattttgctgcatgtcaccagacctgcagcattttctgctgccgcggaggccgccacatccggatcgagaaaccgtgcgccaggcggaatgtcgttaagatctgctgtcggcggttcaggagaagccggcggcagcgccaccccgttttctttcaggatcgtgctgacctgtttgatttcatcttggcatttctcaatagactcacgaagcagtttcttcaggtcgtcatcaccgacatgattcaatagcatttggtaattgccgaccattttattgcccgccatcacataactccacaagccgaatacctcaccgtaatgcatcggttcatcctgcggatttccgcttaaaatacccatgttcatcctcctcccatattcaatattgcacatttcataacgtgcccaagcggaggaacatttatgtttcagcggaaaagatttatgaaatgaaacaaaacaaaaaagacaagagtggcaagttgccaaaccattgtctttcctgttgtttgattggacgcactgaagggattcgcaccccgacagacaagataccggaaaccattcaagtgctttttaatatgagtcattgattctgtctttaataaactttaacgagatggcgggatgctttgcggaaaacgaaatacattttcggggtcatatttcgcctttatttctcgaagccgcgcaaagtttgcgccataatattcttttccgaagttttcaatgttttgatctggaacattaacatatgaacctgctacatatggttgcatcagctgacgcactctttcaactgatgcaagatttgaatcttcttgtgatttatttttccaactagccgtccattccgtataaaatattggatggcgccaaaaaaaggcagtttcgtctttagggactctgcttatagcaccaccccaattgataaaaaagaaattggcatctgttccagtagcgtcttccaaaaattttctcatgattgaaatgggttcgtcagaccaaaaatcatgaccccaagccgaggagaatttaacactctgatcatttctgccagggatgggttcgtcagggtctaagaaatctatagcatctggatagtataatgttttgatatctgcttctgttggagttcccgcatgtaataaaggttttaataatcgaatcaattcagttttcgaaccgaggaaaattccttctgcatgacacaaaccatttattttgctgtaaatttcaaggtagcatcctaatcgttcatctacaaacggagcccatttctgccaagctttaaataccgtttctaattgttcccacggccagataatattgaagacggttgcagttttaggggcacgatgaactttgaatgtatattgggtattatatccaaagttacctcctcctccgcctctagaagcccatagcaaatcctcattgtgagattgatctgcatgaataatccttccttttgcatctaccgttttcagcgcgagaaggttatcacttataaggccaatcgatcgtgagagtacaccaaatccgccgcccatcgtaattcccccgattccaactgttgggctatctccaaacggagccataaaaccgtctcgagctaatccctttacaagcgggccaacgggaataccagtttgaacggttgcaatcgcgttttcttcatctaagaaaactttattcatgtcactcacatcaataacaattcctccacttactactgaaaggttcttatctaaagcatggcgaccgcttctgacacgtaagggcactttattctcacgagcccatttaatggcattacttacatcgtatgaattttgcgcaaaaacaaagacaagaggatagacatccacataagggttccaattcttaatagcctctgtatagccggggtctcctttgaaaattacacgccctgtcaactgtgttgatcccatatattatttcactcctaaagaaattcgattcagatactaaaatatgcaggagctggataatcgcatagacaaatgatctacgaactataaatataatacgctaaggcctttttcgtcggtaaggtctgctgagaaacatttttcaaacaattttgagcaaacttcctgtccaatcctccaacaagcgttttttcttatcgtttttaggagcagtgtccagtttttttcggagtgaatattcgtttaggccaaaagaaaagagagatgaagaagtgtttagtaccagaggtatacatccatacaacagactctagatcatcatatactgaatgtatgtagaaaggagacatcagctttggcaaaatatcggattatgacctttgacggcggcggtaccttaggtgctttaagtttgcaactgttaaacagattggctaggcaaaacccgaagttaattagtcgaacccatgtattttcgggaaattcaatcggttcatttactgcccttgcattagcaagcggaagatctccgagggaaacacttcagtattttgaggatgaaatcctacccgcattcagcatttcccggccaggcggacctgttttcaaccaacaattaccctattccggttttattaaagcggtaagaaattttttcccagcagatcttcaacttatagatttaagaaaacgaattgttgtcccatcattcaaattatactctcaaaaactggatcgttggactcctgtcttatttcacaattttcccggctctccctatttaaatgagaaagtaagtgatgtcatactgcggagcagcggtgctcccgcgacgcaacgggcctatcaaaactatgtggatgggtatgtagtagcaacgaaccctagtacagccagtatcgcgtttgcagttggtaaagccaatgtgccattggatcaaattgcggtattgtccatcggaacaggtgaagccccgacccggttaagaagagatacgaagggatggggaatggtaagtgcagataacatccgccccgaaaatctgaagaaccttcctccaaattggggagttcttttggacaggtcgcctaatgaacctttactgccatttcttcagatgattgctggcggtaatgggtactatgaatccatggtcagtgcgaatcttctgggagatcgttttttccggttagatccacggattccgaacttctccaaaacggaccctgccgtcgttcccgctgtcattgaaattgcgaacaaaaccaacttacagcctgcgattcaatttatagagaagaactgggggagtaaataaatttttattttaaaactattctcacttatccaattttgtccgagagaagattctcaaaataaatacaggcaatgggtagaaccggatttttttaaaggtttgttaatcacaagctaataagatgaatgaaaaaatcaattcatacttcttcttttgaaagtgagggttcaaactaaagaatgtaattgaaatgttactctaaggtatgcaattccctttttcacacaaaaaagacaagagcggcaaatcgccaaacccttgtctttcctgttgttctattggacgcgctcggagggattcgaacccccgacagacgtggtaccggaaaccaccgctctatccaactgagctacgagcgcagaatgactgcgttatgagaacgtcagcacaactaattatacgataattccattcaaataacaaccctctatttcgagaggccgttttttaaatagacaaagcatcttaattggcaatctgacatacgatggtttgaacccctgtatttttggggaaaatgggaaaaagagacgactttgcatatcaggccagctttttgtttgacctttattgaccaaaaatgtatcatgtaactacatacttacctaaaaggtgaaggaggagcattatgaatttaatacctacagtcattgaacaaacgaaccgcggggaaagagcgtatgacatttattctcgtctattaaaggatcgtatcatcatgcttggatctgcgattgatgacaacgttgcgaactccatcgtgtcacagcttttattcttagcagcagaagaccctgaaaaagaaatttctctttacatcaacagcccgggcggctctattacagccggtatggcgatctatgataccatgcagtttattaagccgaaggtatctacaatttgtatcggtatggctgcgtcaatgggcgcgttcctgcttgcagccggcgaaaaaggcaaacgctatgcgcttccaaacagtgaagtcatgattcaccagcctcttggcggtgcgcaaggtcaggcgacagaaattgaaattgccgcgaaacgcattctcttgcttcgcgacaaattaaacaaagtccttgctgaacgtactggccagccgcttgaagtgatcgaacgcgacacagaccgtgataacttcaagtctgctgaagaagcgcttgaatacggcctgattgacaaaattttgactcacacagaagacaaaaagtaataacacaacctgcaagagctgcgtctcttgcaggtttttttcatttcaaggaattgactcccttaaacactttttgttctatactgctcccatccctcatgtaacagctcaagcgtcaaatcattcgtctgcctcacaaccagatcagcaccaagcatcggctgtccttgaccgacaccaaccgcaaacatccccgcagatttgattgcagaaatgcctgcttctgcgtcttctattgccgcgcaatcagcaggggaaacatcgagcatcgctgcagctgttaaaaagatgtcaggatcaggcttccccttcgcaagagtcgtcggatcaacaatggcatcaaaatcatcgataattgccaaacgtcttaaaatcttaggagcattgcgacttgaagatgctaacccgatttttatattttcgtttttcaattgacatagaagcctgccaatccccggtaaaagatcttccggcgtcaatttgctgatcagcatttgataatcgcgatttttccgatgcataagctcttgtttctccgcatttgtatactttgtttccgcaccgccaaagatcaatatgctttcaagtgactcttctctgctgattccttttagcctttcattcatgtctctgtcaaaagggatattaatttgttctgcgatgtgcttccaagcgagaaaatgatattcagcagtatctgttatcactccgtctaaatcaaaaatgaccgctttcatatactaatgcccatcacagcttcataaggtttgaggctaatactctttaagtccgcccgctcctgcggatagtttgaaatcagcactttccaacgctcatgaatcagttctggaggcgcttcgaacagagccttttcttccgataaattcacaacgacaagaagcttttccccttgatattctcgaaggtaagaaaagacctgcggatcattctcctgcaaaagctgataatcgccatatatcataatcttatattgctttcgtaattgaatgagcttctgatagtaaaagaaaatcgaatcttgatctttcaaggactctttcacattgatatcttggtagcgggaatttaccggtatccacgggtttccggttgtgaatcccgcatgttttccggcatcccactgcataggtgttctcgcatgatcccttccttttatcatcacggctttgagaaactctttttctgacatcgttttgttttcgacgactagttcacgatatgcattctttatttcaagatcatcatacatctccagcggcatatcgctgttgaccatgccgatttcttctccctggtaaataaacggcgttcctttcatgccgtgcagaaccgttgcaaatgccttcgcacattctttacgcagcttcccatcattgccccagcgggaaataaccctcggctggtcatggttctcaaaatacagggtattccagccgacattcattaacccggtctgccaccttgtcatcgtcttttttaaagcaatcaaatcaaacggcttgatctgccatttcccatttggcgagttttgttctgtatcaatatccatatgttcaaatgtaaagatcatattcagctcttgcctgcttgcatctgtgtactttttcgcctcttcaatatcagagccgtttgcctctccgactgtcatgcagtcgtaatgagaaagcacttccctgttcatctcttgaataaactcatgaagacgggggccgttagagtgataacggccgacaatatagctgcggctgtgatccgtttcgtagtccggaaaatcggtgtatttagaaatagagccgatcacatccatccgccagccgtcaacgcctctatccatccagaatctcattacatcataaacttcccggcgaacggcttcgttttcccaatttaaatcaggctgttttttcgaaaagtagtgcaaataatactgctctgttccttcatcgtatgtccacgctgagcctgaaaagatcgatccccaattattcggctctgagccgtccggtttaggatctttccaaaaataataatcccggtaaggattgtccttcgacttgcggctttcagcaaaccaagcatgctcatctgatgtgtggttcacgaccaaatccatgacgattttcattccgcgtttatgggcttcatcaatcagctgaaacatatcttcatttgtcccaaacttttcgtacatgtttttgtaatcgctgatatcatatccgttgtcatcctgcggggaatcaaataccggggagagccagatgacatccgccccgagatttttgatgtaatccagcttttgaatcacaccttgcaaatccccgaatccatctccattggcatcataaaaactgcgcgggtaaatttgataaacgacagcttctttccaccattcactcattaggcgttctcctttcacatcgtccctgtaggacaactggttcctcataaacgttcatgtgcagcggctcgccttttacaagctcaaaaataacgcgcttttcgtcaaccgtcacattgattaatcgatttcgataattgatgttgaatgaatattcgtcccattctttcggcaaaaacggagcaaatgacagcgtctcattcgcggtgcgcatgcctgcaaagccatgaacgattgccagccagctacccgtcattgaagtaatatgcaagccttcttccgtatcatgattgtaattatcaagatcaagccttgctgtgcgcttatataattcgagcgctttcttttccagcttgagttcggctgcgagaatcgcatggacagagggcgataggcttgattcatgaacagtcatcggctcataaaattcaaagtttcgccgtttttcttccattgtaaaacggtcattaaaaagataaatgccttggagaacatctgcctgcttaataaaattggagcggagaatcttgtcccatgaccaattctggtaaagaggccgttccgctggatctaattcgtcaactgcttgcaggtctttatccaagaacgtgtcatgctgaacgaaaatttgcagttcttcactatacggatagtacatgtgctggatgatttctctccagactttcaattcttcttcctgtacatccagaaggcggcgtttctccgctgagatactttcgagactttgtagagtatactccaacgtccaagccgcaatgacattcgtataccaattgttgttaacgttgttttcgtattcattcggccctgtgacgccatggatcatatacttattttttcgtttcgagaagtgaacacggtcggcccaaaatctgctgactgccacaagtacgtctatcccgtattcttccatatagttacggtcgcctgtataattgatataattgtagatcgcataacagatcgcgccattgcggtgaatttcttcaaaggtgatttcccattcgttgtggcattcatcaccggtgaacgtcaccatcggataaagtgcccccttcatccccaattttgccgcgtttcgttcggcagcctccaactgatgatagcgatacaaaagcaggtttttcgtcacctccggctcggctgtcgccaaatacatcggaacggcgtacgcctcagtatcccaatatgcggcacctccatatttctcgccagtaaatcctttcggcccgatattcaaacgggcatcgcccccgtaatatgtcgagaataactgaaagatattgtagcggattccttgttgaagctcctcatctcctttaatctcaatgtccgcttttgcccatctttccttccatcgatcagtgtgcctccgttttgcatcttcatagccgttctctaccacatccgccaaaagctccttggctttcgataaaagctcttcctcccgaaaatcacgggaagtcgtgacaatcacaaactttttcaatgatgccttcgtttggtagctgtagcgattctcgacatacatttcattcgttttaaagcttttattgacaaaaccctccgtctcatttgccattgcggctaaaaccgtgaagcgcggtgttccaaatggattttcgatcgtttttgccgctaaatggccgctgtgagaatcagcacctttcgcttcctcctgccaaaactgttcttggtagttagaatcttcatttgccacatttccatccaggtaaggaacaagcgtaatgacagcatctcccgtcaggcactccgcttcataatgaatcgcacagagttcttttacagcaaggctaagaaaccgctctgacctgattctgacggatttatcctgaatgcggacaacagcgcttcgccgcagaatcccctctttcatattgagttctacctcaaatgattcgattgggttttgatggagatcgattttttcaccgtcaacatataggcctatgcccataaagttcatcgcattgatcacttttccgaaatattctggatacccgtttttccaccagcctactcgcgttttgtcggggaaccacacgcctgcaatatatgtgccttggtgactgtcgcctgaatagccttcttcaaaattccctctgacccccatatagccattggcaagagacgtcaggctttccagcagccgtgtatgctccttattaaatgtatttgttttgattttccattcatcaatctcaaataaccgctgatttatcatcatttcctcccgaatgtaagtttccattatcacggcgggttttggtcaaatatctaaatgcaaaagaaatcatcaaagtaacgccacacgaatggatcatcaatacagtaatcaaatcaaaatgaaccatgccgatagcagctgccgcaaatgccggcagtgccgaggcgcaaatcgccgtagatactgcttccttgaatgacgcaatagagatcatgtttgatatttttgtgatccagaggccacctgcaagaacaaacgttaacaaaagctggatcataaagattaccgcatatgccagcatcatgatcatcggcttatactgtgccaaccataatgtatcgatcaaaacctctacatcatggacgtttggtttctcgagcttaacgtccattttcgcatagccaacagaaaaccccgtttcgttttgatcggtgatcaccagttgatcaggttgaaatatgatagcgttttcaaatccagttactttcaatcgcccattttcaccgcttgtctcatattcatgcttcatatcgactgccatcacattctgcccatcttcaatcctctcagaactcttcccgcctgttagttttccgttcctgatttgaaaaccctgtaattgatcagcaaattgatcattaaccccttgaatcgctgacggcatgaaagatgcaacgctgaagcgatccattttcacaaacgaaaccgctaacggcgtcattaagcaggccgttaaaaacagaaagagaaaagagagctgcagccagctgaaagtattcccgtaacggcaaacacctgatggggatgcacccgccttcaggcagcggatgataaagcttttattctccagattcttcattggcattacccctttgttccgccggctgtcaatccggacacaaagttcttttggagaaaaaagaataagacgcatatcggcagcgcggcaagtatggcaccggctgcaaatagagctactttttgctgctgcggattagaaataaaggattgtaatcctacagcgatggtcagcctttccggtgagcgaagcagaaatttcgccagcaaatagtcgccaaacggtgccataaacgcccaaagcgcttgtaccgcgagcattggcttaacaagcggcagaacaattgaagcgaaaatcctcagatgtcccgctccgtcaattcgcgcggcttcatcaatttctctcggcacagtatcaaaataacctttcatcagccacgtgttcatcggaattccgccgccgatatagatcgctgttaaaaaccagtattgatcgagtgcgcctattagcatcgccaagacataaaaagcagtcagcgccgccattgtcggcaccatttgaatgattaaaaagaatatcaggctcttttttctgcctgcaaaccgatagcggctgtacgagtacccggcaagtgtcacaatcgtaacctgcaaaaccatgaccgatagcgcgatgacaagtgtattgctgtaccaatgaagataaagcgtttcttcaaatagccgcttaaaatgatccaacgtccaaggacccgaaaaatcgagctgaaaagccgccgaattccccacacggaaggctgatgatgccgtaatcagcaacggatatataatgacaatacttaaaagcgtcaaaaagaaatacgtacagattttattaagcattctggcagtgctcgcgttcacctacataacctcctcattgccaaaagcattcgattttttgaaagcaatcagtgaaattccaatgacaatgaaagaaattaacagtgtcacagccgccgcaacggaatattggggtgatgtgcctgttgtcagtttataaatccacgaaattaagatatcggtcgatccggccccggctcccacactgcctggccctccctcattaaataaatagatgatcgagaaattattgaaattaaacgtatactgagtaatcatcacgggtgctgtggcaaataaaatcatcgggaatgtaatatgccgaaaacgctgaataaaagtggccccgtcaatctttgccgcttcatacaattcacctggaatcgcctgaagcactcccgttaccatgacataaatatatggaaagccgagccacgtctgaatcataatgagggctgtctttgtccagaaaggatcagtcttccacgcgatcgcaggcagctcaacaaacggcaggtgattgaatagtggaatcacctgtgcattcaccgctcctatgctgtcgttaaacatgttggaaaaactcatgattgtaataaacgccggaacagcccatggaaataagaaaatcattcgaaatatccgcttgccttttataaaatcctgattgacgaaaagggccgtcacaatacctaaaatgatttgcagcgttgttgcacagattgtccagataaccgtccagcccagtacattcacaaatgtttcacgataggagccaaggaaaaaaatattcaagaaatttttaaacccgacccagtcaatcagacgattaggcggaatatgataaaaatcatagtttgtacatgcaacaaacagagtcaccaaaaccggaaagataatcacaaacaccatcatgatatatgccggcagtgtaaatagatatggaaaccctttatcgcccgcatgacagatcatatccttggctattgtattgacttccaaacccgccgctttcatagcggcggtcttacgtgaatcatgaatattaaagatatagaacatgaggaaaatcattgtcacgatcaattgcagcgtgccttcaatcagcataaacagcgagtggtcttcaccgggaacacttcccaatgtcatcaatccggttagcgcctgtataccgaaaacgcataattcaaaagcaaacaagcctgtaatggcaagaaataagagcccctttgacaattgctgattcgcaatctgcccaagtcctggaatgatcgataaaagccctgcctttcgtttttgctttgcaagtgtgtgatgtttattcattttttccgccctctattcttccggacgctatcccgccgttttatttcacatacttttctttaatattttcctttatgacgtttacagcatcattcgctgatgtttgtgtcgatttttttcctgaagctgcatcaaaaattaaactttccgctcctgtccatacttcagccatttccggaatatttggagtcggcgtcgctgtttcatattgtttaatcacagctgacgtcagttcattcttttgctcatcggctttcctccttgcggcagtgttggccggaacttcgtttgtattctgataaaaagcgtaagcattggcatcatttgcagcatactcaagccatttttcagccagctcgggctcttttgtatattttgaagctacccagcccttcccgcccgcaaaaggggcatattcttctccattgggcaatgtcggaatgggagccgctccgtagttcaatttagcctctttatagttggcagctgaccaaggaccgccaatgatcgcagccgctttgccttctaaaaacatctgctgaataaagtcgtctgcgcttgaattgtcttgcattcctttcggccaatatgtttcaaaccatttctccgcatatttcaccgcttctacagcccctttattgttcaggccgatgtccccggaatctgtgccgttttttccaaacacatatccgccgtaaccagccaataagccgtacgacatataaaagtcagtccattttgctaaaaatccggttgattttcctttttccgaagcaaacgcgaatcgaggatcttccgttaacttttcaaggtctttaaatgtttttggcgctgtttttaaaagatctttgttgtaatacaaaataagtgtctcaatgactagcggcattccgtacactttgccgtcaactgtcacctgctgcatttctttatcaccaaagctttttgtgttagatggcttaatatcaagtaaatgtccttgttgtcccaaaccgccgatccggtcatatgcagcaagcataacatcaggcgcattacccgccgggccatcaagaggaagcgcttctaactgttcgaacatttgcttttcaacaatttttactgtgacatcattctctttttcgaactttgtttttatgctttcaatgtattctttatacgtttcttcgacggacacagtcagcacctttttgccatcagcgcttgctggattttttgaacttgagcaggcggcaaggccgattgccaggaatgatgccgccaatatggcgaaccccttttttaaaagaaccatctcttttcccccttctatttacgaaactataacaattgtattgtcctatagaaagcggttacaacaacttttgatttgttaccgataacagaatgttatacaggggcggcagcactcaaaatcaaaaattctcccggctgaacggtaatgacatcgtgatgctgaagcggctgctctgtccatgcatcacagatcctcttattcctttcaatattcaaatccagtaaactgacatgttgaaccgcattcccttgattaaagaaataaatcagtattttttcatcaagagtccgtgaaaagctaataaaatcgttttggtcatccagcagattccactcaagatgtccttcagtcaataaagtgttttcctgcttgcgtaaagcaattaaccgtttcataaattgcagcatgtcttggttttgcttctctttttcccaaaccatacattttcggcataatggatcattttcgccgttcagcccgatttccgttccgtaataaatgcatggtgagcctgtctgggcaaacataaaggccagcaacgcgcgtgctttcttctcatcattgcggcatctggtcaaaaggcgctttgtatcatggctatccagtaaattaaacatcacctcattggcctgcttcattccattcatcaaatgtgcattgacacggtgagccatacgtgaagctgagatcgtctggtcagcaaagtattcaatcataggctctgtaaaagggtaattcatcgccgcatgaaattcatcccctctaagccagggttcggcagaatgccagatctcacctaaaatataaacatcaggcttttcagtagatacagcctgcctaaatgtcttccaaaaagcgtgatccacttcatttgcgacatccaaacgccagccgtcaatgtcaaattcgcgaatccagtacaaagcaatatcaagcaaatatttctgcacctcgggattagccgtgtttagcttcggcatatcagctgtaaaagcaaacctgtcataattgtcgtctgtgacgggaaaagagtgaatatggaaccagtctttatagcgggattgatctccgtttttgacgacatcctgccattgcggagacgcgcttcctatatggttaaaaaccgcatcaagcataattctcatcccccgctgatgcagctggctgaccaatgtacgaaaaagctcaggatccccgaaatgcggatcaatagaaaagtaatccagcgtgtcgtatttatgattagaaggcgcggaaaagatcggtgtcagataaatgccgttcacccctaaatcctctaaataatcaagcttgtcaacaattccttgtaaatcccctccaaaaaaatcattgacgcccgggtccttgctcccccacggcaatgcattcttcggtgacaagtcttctcttccatttgcaaaacgctccggaaaaatttgataccaaaccgttgacttgacccattcaggcgcttgaaatgtatcagcctcgtgaacaaacggaaatttaaagtaataatgaatcgtttccagtgttttttcgttataagggcatacacccgaacttccgaaaaagatgtcttcatgatcgtctgttacaacaaacgcatattgtaaacgcctaaatggcggcaccacttcagcaaaccaatagtcatgcatttctgtagcagcaattttcctcatcggctgctcgtttgccgaccacttgccgtcgttgtactcatagggatcaccccaaatgaatcgaatgtgatctgcatcacctttttttgtccgaatcttgatatgcacagcccgcccatcataagaataagcatctgtgctgaatggctggtggtgaatcgctgcatattccatcatgtttccccctttgatttccgttttattgaagccggctcatagtttgaaagtatcatgatgaaattgtgggaacaatccttttcaccctgttaccgataacagaataaggcgcttacagcgttgattctcgtacaattaactctggttcaaaaaatagacttccttgtgcagcaccgtcttcattcatttttttcagcaacattttcgcacaggcttcccccatttcaacaacaggctgtctgaccgtagtcaagcgcggcgaggagatgcgatcaagaaacacaccgtcattcccggtaaccgcaacgtcttccggaattctctttccaagggattgcgccgcacgaatgacgccgagcgcgattcgatcagatgcgcagacaaatgcggcttgattgtccatggatttcagcagttctcttgcaaggccctcacttttcttagaactgttgtcgatccgaaacatattcgattttttaaagcttttattcatcgcccgtatatacccctgttctcttgcacgttcgaaaggctcatctaaatcaatgccaaaaaagacaacttcccgctcccccagccccataacatggcgggttgccataaaagtgcctttctcgttattcacatcgataaagtcatagcccatttcattttgtccaaatacgacgagcggcttctcaaacgcttttattacaccttcaaaatcgttctttctcaagccggtggcaataatgccgtcacattggccaatattaagagaatttcttgtcacaagctggagagcatagtgattgcgatccagctccctgctgattcctgtcagcaggttcatgtaatatggttctgtcgtatccatttcctcaagtatcaatagtttcacaacctgtgttctgttttgcacgagcgctctcgccgcataattagggatgtaattcagctctttcatcgcagaatgaacaagctttttcaattcatctgtcaccgtctcagggtgattgatcactcgtgataccgtcattttcgaaacatttgctttttttgccacatctgacaatgttgccattttcatcccctccttatctgtgcttattatccaaactagtgataaagtcctctattactgttaaatatacgatgcaggcaaaagagaaataaaaaagagatttcccttaaggaaacctcactttgttaaaaactctcgatttttcatggattcatacgctaggtggcagactcattctctccacttccatgagaaagtctcttttttaaatttctgtccactttttttctaaaatcggataagaataattttgcatttgctcaattaactcatccggccgtgacgagctgtgaatcagttttaggtgcgattcgttagaaaacccttcttgaatgctgtatttcaccattttcatcattggttcaaaatatccgtttacattgtacagtccgattggcttttggtggatgccgatctgtgcccagcacagcacttcaaataattcttcatatgtaccaaagccgcccggcatcgagataaagccgtccgccagctcgctcattttagcctttcgttcatgcatcccgtttacttcaatcagctcagtcagattctgatggacaacctccccgctgaacaaaccgctcggcatgaccccgattgcagttccgccgttttccataatcgcgtcggcaatcgtgcccatcaagccgacgcgggagcccccatagacaaggccgattccctgctcagccatatacacgccaagctctgccgcttttcttttatacgcttcatttcccccagggtttgatcccgcaaatacacaaatggttttcatcttgtcatctccgcatctatatatcgtgttaaacattcaaaaacacactatatattgtcccatcttcatgtgataatatcaatatgaaatacataaagaatgcaggagtgatgaggttgcagctggctgatgcagaaaaatggatgaaagagttttacgaaaaaagaggctggacagaatacggaccttttattcgcgtcggctttttaatggaggaagccggagaattggcccgggctgtcagggcgtatgaaatcggcagagaccggccggatgagaaagaatcgtcacgcgctgagcaaaaacaagaattgattgaagaaatgggagatgtcatcggaaatatcgccattcttgctgatatgtatggtgtctctttagaagacgtcatgaaggcccaccaagaaaaactgacaaaacgatttgagcatgcataaaaaagcggccgcgatggccgctttttttaacctgtgatttcatcatggtgatcaaagaaatgctgctttcctattttgtgaaaaaggcctgttttatgcagcagctcctttggctgcgattgcaatcctacaatcatcagctttccattgtggcgtttaatccgattcataatgttcccaagcaccgcttcagctgacgtatccatatagtgcaccttattcatgagcagaatgagggttttcggttttttctgtacatgctccagcaatgacgattcaagggaatcaattgatccgaaaaacaacggtccttctatggcatacatgctgacagatggatcttctctcttcgccagaacaggatgcgattcctgattgtggatgcgggtcgcttcgctcattcttctgataaagaacacaaatgcaagcagcaatccggttgccacaccgatgattaagtcaaacagaaccgtaagggcgaaggtcgccgccaaaataaaggaatcagcgtttttcagtctcagcatgtttgcgacttccttgcgctcactcatattccatgcgaccaccatgagaatcggtgccatactggcgagcggcacatgggacgcataaggcgcaaatacaagcaggacaaggagaacgactacgccgtgaacgacgccggaaactggggaaaccgctccgttttttatattggtcgccgttctcgcaatcgctcctgtagccgggattccgccaaacaggggcgctgccatattcgcaattccctggccgacaagctccttattgctgtcatgctttgagcccttcatgttatcagcgaccattgcggacaaaatcgactcaagtcctccaagaagcgcgatgacaagcgcagccggaaacagcataaccattttatccaaagtaagctcaggaaactgaaattcaggcaaatggcgggggatttctccataagttgacccaatcgttgccatgcggtcagggaaaaagacaaccgcgaccactgtggaaataagaagcgccaacaaagcgcccggcactttaggcatcaccttggcggatacaagcaaaatgacgagcccgatcacagctgtcaaaatggcatatacgttaaaggtgccgagctgctgtacaatttcaaacatgttgtggtgaaagttctcatgtttttcaacatttctcaatccgagaaaattagcgatttgttccgtaaagatcagcacggcaattccggctgtaaaaccgacgataacgggtttaggcacgaatttcattatttttccgagcttaaacagcccaaacagcaccagcattacccctgccataaaccctgcgatcagcagattctctaatccgtactgcatgataatgccgaacagtatcgggacaaaggcgcctgtcggaccgccaatttgatatttagatcccccgaacaaagagatacaaatccccgctataacaacagtgtacagcccgtattcgggctcgactcccgaggcaatggcaaacgccattcctaaaggaattgccacgacacctactacgatacctgcaattaagtctttctgaaatttctgtaaattgtatcccttgaatctccctgagaatcgcatattttgttataacctcccttatgagtgattgtttattagctcagtttcataaccgttaatgaccacatcaagttttcctgtttcagggtgaatgacaagcccgtgaaccggcacttttttcggaagcagcggatggttcttaatcatgttcacactgtgggaaacgctttcttccacgctgtgaaaaccagtcagccacgttttcaaatcgagtccggcactcgtcagcaaattcaggcagctatcctccaccccgcgttcctttgctttctcaagaatcgaggacgcattcagccctgacattccgcattcatgatggccgacaatgcatacctcttcagcctgcaattcataaatcgcgaccagtatgcttcgcatcacgcttccaaatgggtgagaaacgatggctcccgcgttttttacaattttagcatcaccgtttttaagccccattgcttgcggaagaagttctgtaagccttgtatccatacaggtgacaatgacgagctttttcgaaggaaactttgtcgttttgtacggttcatacttcttctcactgacaaaccgctgattgtgttccaaaattgatgttaaagaaaccatttgattcatctcccatccatatgattttgcaagccttcttacccagcttacagtaaggaattatagcataggaataagccaagaaaaggctttcaaaaaaagacactataattggactgtagaatcaaaacataaacatttatatctttcaaagataataaaatttatatttaatgaatcctataatccggctgcagctcgcatattgatgatttgtctgacaaaaaatatgggtgaattctgataattaaaaaacttttttaagcagatatagctgttcgatcttcattttaagttcaaaagaaccagaaactaaaaaaacgcagctatatttttaacacctatttattttcgatataatgaaatagacaacagccataaagggggagccttgttgaaaccatttgtatttatcacaaaaccgattcctgaagagattgaagcattcatcggtgaacattgccgttatgaagtatggcaggaggatacgcttccgagtgacgtgctatttgaaaaattaaaagaagcggagggacttttaacatcagggacgtccgggccgtcaatcaatcgtgagttgctggaacacgcgcctaagctcaaagtggtcagcaaccaatcagtaggctacgataacttcgatatagaagcaatgaaagaaagaggagtcgtcgggactcatacaccttatacactggatgacacagttgcagatctggctttttcactgattctgtcttccgccagacgtgttgccgaactggaccgttttgtcagagcaggaaaatggggaaccgtggaagaggaagcgcttttcggaattgatgttcatcatcaaacgttaggcattatcggcatgggcagaattggagaacaagcagcgagacgcgccaaatttggttttgatatggaagtgctttatcataaccgacatcgcaaacaagaaacagaagacagcatcggcgttaagtatgcagagcttgatacattgctggagcaatctgattttattcttctcattacgccgctgactgatgaaacctatcacatgataggagaacgcgaatttaagttgatgaaggattcagcaattttcgtcaatatttcccggggaaagacagttgatgaaaaagcactgattcgcgctcttcaggaaggctggatcaggggagccggcttagatgtatacgaaaaagagcctgtcacccaagataatccgctcctgcagctggataatgtcacgctgcttcctcatatcggttcagcaacagctaaagtgcgcttcaacatgtgcaaacaggccgccgaaaatatgctcgcagcgatccaagggcaaacaccgaaaaatcttacaagagaatttcaataaatcaaaaatccggtctgataacagaccggatttcatattacatacgctgaagaacagcacgcttataaatatgacgggtgacgatataataaagagcctggaatacaaaataaatgaagatgacaattacggcctcaagaaataaattggaattcagcatattacttaacgctgcatacgcaaagcccgcgtgaatcgtacctgcgataaatgggatgaagaataaaaatcctatttgctttccaaggatcgagtgaatctctttgtccgtaacccctatcctctttaacgctaacacctgcactctcgtatcttctatttccgtaaacatccgcaaatacagcatgcttccttgcacgataaaaaacagcacgctgacaaacagaccaataaacagcattaatgcaactccctgcttcacaatttgataactaggagcacgtgtttgaaaatcagatgtatgttctttcggcaccatgttttcaagcttttcagagacatccaccgtctcctgccaatgctcaagctcataacctaccattctcatctgttccttcagcggcacatcctgtgacagactgtcaaagctcttttcgctgacaaccaataaacggctgactccatcgacagacatcaatatccctttgttttgctgctttttcatgacataggaaagggtttttcctgacttcatatgaaatgctgctgtttccccttctccaaatgtgtctttcaccatcatttgaaaagaaacattaataaatgcttcattttcttgtaaatgaataactgggaaccctttttcctttgcgacttgattatagactttttctgaaatcagcaaagcttcagcttccatcttcttatttccatacggcaagtctgactgaaaagtgacaggaatccctgtggcatccaccttatacttgataacagcatgagcttttttcaatgtattctcagctgtctcaggcttcatgacctgaaagcgggaagcatccttttccacccaggaaacagactgaggaatgctttgctcctcctgcctttgtaaatcggaataaaacatatagatgacacctgtagctgttagtatgaccgctgtaatgacagaggttaaaaacagcatgcgtgcatgatccttcagcctgaatatcatgttggaacgcacaatgatattcgtgcctttgtagaagctgtgtttctttcggtacagcatgcggaaaaacgccacactgctttgtgtaaaaaagaaatacgtgccaactaacactaaaatcaaaattggaaatacccgaaacatcatgtcaatggcattggctgttgcagatagataataaccgctgccaagacatagcaaagacaatacagtgagccatttcgaataaaccggcaaacttttcggctttttggccgatttaatcagttcaatgatttccagcttccgaatccgtcccagtgataaaatgagcagcgtctgaaacaggatgagaaagccggcaattgtcatcacaaacgctttcggcacaatggcaaacgaaatcggcaccttcacgctgagcatccatgtcataatcataaaaaacagttttgaaaataacaggcctgctccaatgccggccgcaatcgccgcaagagaaataagtgactgctcataataaatcatcttgcgaagctgctgctttgatgtgccaaacagtgtcagcagcccaaactctttctttcttgcctgcaaaaacgctgaattggaatatgtgatgaaaaatatacaaaacacaatgatgacgacaagagctgcgctcaagcatgttttgacaaggcttccgccatatatattgtcttcattgacatcaggatgaaaaataaatgatgtgaagacaaaaaacaccgaaacggcaaacacacagcttaaaaagtaggccacataccgttgcagattcccaagaatgtttttacgggcgatagttctcaaattcatgaaaatcgcctcccaacacactcaaggtatccaatatactttgataaaacacctgcctgtttgttcctctgtgaatctctgaaaagaaacgtccgtctttaataaaaacaattcgtttacagaaacttgctgctgtggcatcatgcgtaaccaacagaatcgtcgcttccttttcctcattcagctgagccagtgtgttcatcacttgctttgccgattttgagtcgaggtttcctgtcggttcatcggcaaggatgagcgccggattgtgaataatcgctctggcacaggctgcccgctgctgctgtccgcccgaaacctcatatgtgcgatgatcgagaatgtgcttgatttgcagcgtatccgccagttcatccaatcgggcttccatttctctcagctttaccttatccaatgcgagcggcaagagaatattttcacgaatcgtcagcgtatcaagcagattaaaatcctgaaagacgaagccgagttctcttctgcgaaacaaagccagctcttggtcctttaacgttttcggctgaatgccgttgatcatcatctcgccctgggtcggcttatcaatggtagccagcaaattcaaaagcgtggtttttccgcttcccgacggccccataatcccgacaaattccccttttgacacactgagatcaaaggcgctgagcgcttggtatgatattgttcctttatttgaatagtacgttttcgataggttcgttgtttgcaacacgttcatgttctgctcctcctttttctttattataaaaaggaagtcagcatcctcccatcgaactttcttgcaattccgctccccaaccttacaatgctgtcacattcacgagggtgtcacttgaaaacacgatggtcatcacagtgccagccccttcttttgattccgcatacagcttatggccgagacggctgcacacctgttttgctaaataaaggcccattccagttgcctctttcatggttcgtccgttttctccggtaaaaaacgcgtcaaaaatccgcggcagatcctgtggcggtatgccgattccttcgtcggcaaccgacaatcgcgtctcatgtccctgtgtttcaatccggattgtaatagggtctcccacaccttgctttgaatattttaaggcgttgaaaaggatttgctcgacaacaaaggaaagccacttttgatcactggaaatctgaacggcatttggcggcacatgtaatgttggaaaaaggcgccgtttaataaactgacgtttttcctgattgatcagtgaacgaaccatttctgccaaatcaaaggtttgcggctttacatcaaatgcaaattcctccagccgagccgtttgcagcatcatatcaagaccgtaacgaaatctctcattctcatcctccagctcctctaagaacgtcggaaaagaggatgaggttccgttttttccttcctgaatcattaaggatatgacggataccggtgttttcatatggtggacccattggttggtgaaggtgtaatgctgtttttgctgattgatatattgtgagagcctgctttcgtattgctgcccgagtgcgttgatcatcttcgtccaaagcacttgctctcctgttcttggctttctggctttcaaagactgtccgatgtcattcgaagaagaggcttgttctgcaagctttttaacatatgtgagaaaggaaatttgccgaacataatcaacagcaaaacctgcggctaaaagagtaccgggcaaaatccatatgtacatcatattttctttggaaggttctgcgccgctctctacaatgcttaaatacgcaatcagcatggcggaccctatccctaataatgaaaatagaataatggctaagcggtcgatgagataagtctttaacactccgcttcatccttccgattgacttgaaattgatagccttgtcctctgattgtggaaatgcaatctgtcagtcctgcattctccagttttctccgcagccggttgacattgaccgttaacgtattgtcatcgacaaaatcaacgtcatcccataacgcctccaatagttcatcacgagagacaatttttttatgctccctcacaaaaatagagagaagctgaaattctttttgggaaaacagaatacggacgctgttccattcggcctcattttgatcaggataaatcgtcagcccgccaagctccactattctagattcctgcggcaaagagggcgagtattcaccatatgtgcggcgcaggacgcttttgattttggccatcactacctctaaatggaacggttttgtgatataatcatcgccgccattttcaatcgccattacctgattcagctcatcggtccgtgccgatataaagataatcggcgcattggaaatggtacggatttgcctgcaccaataaaacccgtcaaaaaaaggcaggttgatatcaagcagcacaagatcaggcttcatttctgcaaattccaattttatatcattcagctgttcagcaattttcacttcatatccgtatttttgaagatgaccgcccagcaaagaagcaatccgctcatcatcttccacaagcaaaatccgatacacgttgatcccccttatatgtacatcacgatgatttttctagaagattccaaaattattatagcatgtgcggaatagtaaatcggtctttttctttttgttatgatagaatgataaaggtaaaattttcataataggcaggtgtcgtgatgaagaaaatcatgctgtttctggcaatgacgtcaattctttcagcatgtcagcccaactataccgggaaatacatagaaattggggatacactaactgactataccaaagagtgttttaaagagaatgaaattccttataaatacgaaaagggaaaactgtatatcccagaagatgcatttgatacagcgatctacacttgttcataagaaaaagcttgcagataacctgcaagcttttcacgttacaaaaaatgagtatttaatttctcttcaaatcctgaagggccgatgtcgcttttttgaatgtcaccgccgttttcatgaatcgtaaaatggcgctctgacatgaccatccttccgctcggcgtcagctttgaggcaagcagggatttgttaaaaggagatttttcatgagagtgaatgatgtccttcatgttatctaaatcaccgagatcactctcttcaagagtaaaggcgtacccgatttgccagccttctcccttgtccatcagcagaacatggctgcccttttctgtctcttctcttttgattcggaatgacccgactggtgactgtaccgtttctccggaaagcggtatcggctggagcgccaggttgatgccgaaaccgatatcaacgaggtaatcgccgttttccgcagacagccatacagcagcatgcgtcccttctagtgcccatccctcttgattgcctgcataaaccgttcctcgaatgagcttcacgtgaaacccggcctcacgcaagacaaaataaaggaaaccatttagatcgtagcataggccgccgtgctgatctttgagcagacgtcgccatagctcttcttttgtgatcttataattctcttttgcaagtacggcacggttttcgaatggaaaacggtatgccattgctttgagaaaaaggggaagatcgccgaagctgacatgatctttctcccagccaattttctgaaagcagtcttttagaaagtcactcatttttatcacctaaacttcttcttgaacgtaagcagccagcttctccagcgcctcttgttcatcttctccctgggcaatcaaggtaacctcagtgcctgtgcttaccgcaaggctcatcagccccatgatgcttttggcgtttacttttttcccatccttctcaagaaacacatctgacgtaaaccggtttgcttcttgtacaaacaaagcagcaggacgtgcttgcagtcctgtctttaatcgaacttccactttctgttgaaccataagatctccccttttctttacggttattttaaagtgacggtttgccctgtccgcagctgttctgcgatttcgtcaagttttctcagcctgtgattgatccctgatttgctgattttcccgcttgctaccatttcccccagctctttcagcgtcacttcctgataatcaatccgaagctgcgcaatttcccgaagtttttcaggcagcgcctccaggccgattctttcatcgatgtatttaatattttccacctgtctcagcgatgcgccgatcgttttgtttaagttggctgtttcacaattgacgaggcggttgaccgaatttctcatgtcccgaacgattctgacatcctcaaatcgcagaagcgaattgtgagcaccgattacgtttagaaactctgtaatcttttcagcctcttttaaataggtaatgtagccttttttccgttcaagcgttttgctgtttaactgaaactcatttaacaggtcacataatgaatcgttatgctccttataaagagagaagatttctaaatgatacgaggaggtttccgggttattgaccgaacctcctgccaaaaatgctcctctcatataagaacgcttgcagcatctctttttgaccagctctttcgaaatacttcgttcaaacacaaaattctccccgagtatttttaaatcctctaagatcgcttttgcattttctgaaaaacgcacaatatagacgttattctttttcagccgcattttctttctgaccagcagctcgaccgacacatcatattgttttttcagcaatgtatagatgcggcgggcaatcgccgcgttttcggtttgaacatcgagtacgagatggcggtttgtaaatgataaagctccattcatccgaatgagtgcagacagctcggcattaatgcagcagtccttcacttccagattcgttaattctttttttgtttctgatgcaaatgacatatagccacctcatttcaaggcttcattctttcagtaaatcaacaagaagagaggccactttatgtgtatcgtgacgtattacgtcatttttatacgttacaatttgatctctgatgacttcaagccccatcgctttcagctcttcgatatcaaaatcaacaggacgcgccgattccatttcgtacttacgttttatttcgtcgggaatgtcttcactgttcactaatatcgtatcaataaaaccgcagcccatatgctgattgagcgctttcacatgatcagcagcggtgtaatggagcgtttcgccgggctgagtcatcacgttgcaaatgtatacttttttcgccggcgcctttatcacttcttccccgatttttgggacgagcaaattgggaagaatgctggtatagaggcttcccgggccgataataatcaaatccgcttccctgattacgtctattgtttccggcagcggatcaatctgttcaggcgtgagaaaaacacgcttaatgcgctgtccgtattctgggatcgttgactcgcctgagaccacgcggccatcttccatctcagcatgcaaaacgacactggcattggcagccggcaaaacctttcctctgacattcagcaccttgctcatttctgtgacagcgtgaaaaaaatcaccggttatatttgtcatcgctgccaaaatcaaattcccgagagaatggcctgttaagtcattccctttattgaagcggtgctgaaaaagatcttcaacaagcggctccacatcggataaagcggcaagcacatttctgatgtctccgggaggcggaattttcagttcattccgcagacggccagagcttccgccatcatcggcaactgttacaatggccgtgatgtcaacaggtttatgctttaggccccgaagcaatacagaaagacctgtaccgccgccaaagattgcaattttcggcttttgtcccatcttatttccggcttctcttttcaatgtcccggtgagtaacatgagtatagtaatcctttttgaaataatcagctaaattctcggctaatgtcacagagcggtgctggccccctgtgcagccgatcgcaatgacaacctggctttttccttctcttttataagatggaagcataaagctcagcagatcaattaatttctcattgaacttttgtgtttcattccacttcatgacgtaagaggaaacttctttatccttgccagtcagcggccgcatgctttcgatatagtacggattcggcaaaaatctgacatcaaagacgagatctgcatcaattggaataccgtatttaaaaccaaatgacatgacatttacggtaaatgtctctccttggtttgtcgcaaagtgcttcacgattttttcacgcaaatcacgcggcttcatgtcagacgtatcgtaaatgatttgagagcggccttttaattcctcaagcagctctcgttccagcgcaatgccttcaagcggcaggccagtcgctgccagcggatgcgagcgtctcgtttctttatatctcgtgacgagaatggaatccttcgcgtccaggaataaaattcgcggtgtgatccacggattttcggccatttcatccagcgcttcaatcagccggtcaaaaaattcgcggccgcgcagatccatcacgagcgcaactttgctcattttcgaatttgattccttcatcagctctaaaaacttcggaagcaatgaaggcggaagattatcgacgcagaaatagcccagatcttcaaagctttggatcgcgacagttttccccgctcccgacattccagttataatgacaagctgaatatcatgtgattcactaacactcatctttctcccccctgacttgtctttctatttgatgtgctgcgggtctaaacgataactgagtagctcaaattccggtgtatacgtaaatgtgccgtgcagcagcccttgtcccttcatcataaaatcaaggatatggccgtctccaggggccataggcaggttctgaatgtcattgacatcgtgccactgcagtttgccctcctctgattcagacacattttgtcctgtataagaatcagcgacaaacgtaaacatcatccactcggagacaatgtggtcaccgtctttaataataaaggtaaaaacgccttttaattgaggatttatgatatagataccagtctcttctctgtactctctgatgacggagtctctgactgattctccgctctccatcttgccgcccggcgcgacccaccagccgcgtctcggcttttgaagcagaagaactttgtcatccgtctgaagcacacaatttgtcactctttgcaagtacgtcacctaaccttcgtcctgtcatcgtctatttattataccgcttcaagatgcctcccacaatgaagagacattgacaatcttttcttctattttacagcatattcattccttaattcagatgattttgctgtaactggaattctcttttatttatggacaaaaaaaggacacggataactggagaatccgtgccaaaaaagtgtattcattataaaaagggggtcaattactttattaatcataaccgaaaagcattacacatgtgttacagcggaattaaaacccagtaacgtaatgtgaaactcgtatgacagccctttttattttaaggttttcagcgtttcttggagctcttcgacataatgctgtacgctttgtgccgcaatgcttccgtctcctgtagccgttacgatttggcgcagtgatttttcgcggatgtctccggcagcgaaaatcccttcaaccttagtttccatgcggtcgtttgtttcgatatagccttcttcattcgtaatgcccaggttttcaaacggtttagacagaggaagcatgccgatgtaaatgaatacgccgtctgttttgaattcactttcttcaccggttaccgtatcgacaagcgttacgttaccgactttgccgttttcctcatgaatttccttcacagttttgttccataggaagtcaactttttcattatcaaatgctctcgcttgaagaatactttgagcacggagtttatcacgtctgtgaacaatcgttacttttgaagcgaaacgagtcagatatacgccttcttcaaccgcggaatctccgccgccaacaacgacaagttctttgcctttaaagaaagcgccgtcacatactgcacaataagatacaccgcgtccgcccaattctttttcgccaggcacgccgatttttttatattccgcacctgcagcaatgatgacagcacgggctttatattcctttgaaccagctttgactactttgtactctttgccgtcaatgacctctttaatatcgccataagcgtattcagcgccgaattttttcgcgtgttcaaacattttgttagaaagctcaggcccaaggatactttcgaatccaggatagttttctacatcttccgtattggccatttgtccgccaggaattcctctttcaatcattaatgtcgataaattcgctcttgatgtgtatacagcggccgtcatcccagcagggcccgcgccgattataatcacgtcataaattttttcttctgacacactattcactccttaaaccatcttttcaagtttgggctctttcttataagataagaatccccatcaaacgtattccttacccatatcctataaaatctcatggtgatacgctatttttttgctcaacacgattaaatgtattcgaaaagggtatatgttaataaagaaagagccttctgttttagaaggcccttgtcatatttattattgaacaacacgtcttacaacgcctttaaatgcttttttccagtaaggattgctcatagagtcaacagatacgccatgagatgtattgtcgtttaggaaagtaccgtttcctaagtagattcctacgtgtccatttgttttgtaagtgtcaaagaacacaaggtctccgcgtttcatttcagacgcgctgacagcttgtcctctgccaactaacgtatcagtagttgttccgcctacaggtccaaggttaacacctgcagaagcgtatgcccagcgtacgaatgatgagcagtcaaaaatacggttgttgatatcagattggctgcgtccgccgccaaacttgtacggagattgtcctacaatgcttgaaccaacgctgatcgcgccttcaattccgccagagttgctgataacagtgccgcctgaattgctgtttgagccgctgctcttcttagaagatgagccgtttgacgaactgtttgatgaaccgttagaagaattgtctgaagaatcatcagatgagcttgcttttgctgattcagttgtcgccgtttgactgtcatctgtttgtgtttcgtcagatgctttttgtgcttcttcctgctttttgatcaaagcagccgctgcttcttgttcttttttgatgcgtgcttgttcagcttcagtatttgctttttgatttgcaagttcagacgcctctgattttaattcagaaatcgctttagccgttttcttctggcttgcttttgcttcgtcgaaaagcttgtctttttcattaagctgtttatcaaggtctttttgcattgtttctaatttagccaatgcagcttgaacttctttcagcttgtcattcaaatccgcttcagaatcctcgagcttcgctttatcctgctcttgctgtttgattaaatctttgtctgcgtccacaatagatgaaaccgcagtcgcacgagagataaagtcaccaaagcttgttgatcctaaaagaacatctatgtatccttgagatccgccgctttcctgtaaagaacgaacgcgttttttcaggatttcattgcgtttttcgatgcgtgcttcagtttctttaatctcttttttcagttttttgatttcttcttttgttttatcattttcttcttttttatcttcgatcttgttacttgtatcaagcgccttagcgttaatgtctttcagttctttttcaatctttgattgattttcctgaagttcagttaattctttttccttcgcttcaatgctggaagcaacctcagattgcttgctttcgattttttgtttcttttcatctaatgtttccgccgatgcagttttacttgtaaatgggatcaaaaaactgcttgtcccgatgacggaagccaaaccaagtgtcaataaactctttctcactttttatatcctcccttttactgtgaacctgtcctcatttggaatcgtattttgaacatcaagtttcgttcctcatactctacgaggaatgatggttgtttatggttaattattctgtgcatctcttattctggttgtatagcgtttatttcacatcatatgtaaaaaacactaattccttatgtacgagaatcattataccatcaagtttcgacaaattagcgataaattttattacatttatgtttcaaacagatgtcaagtcacacatcatttgtcatttttcttaagcgtgcaaaaaaactgtcgatattattttttaaatataatctatcaaacaaaaaagagtcgattaaataaatcgactctttaaaatttactattctagaatatcatcaatatatttcatatatttcgtcaacgttgccggagagatgccgaatcgggccgctgtgtcttttttcgtgtcttgcttgccatgggcttctttccaaatataacagatggctgctgcccagcctttctcattcttcaacggagcagctgcacgaatttgctggatgacatggaaaacccagcagctcatgacttctgttttcatctcttctttttcagcttgctctaatagtttgaccgtttgataggcgaaaagtgcatcctctgaaacgtcagcagccgcggaatctccattcagaagcagctttacaaaatgattttcaaaaggagcggtgattctctttgagcgtatcaccgcttcaagatgctccgtttctccctttgtgctgctgatataataggctgcgagacgctgttccacagatgaaggaagagcttccctccgctcaatccaaggcgccgggcggtcttcgccgggatattgcgactcgacttttctccagatcgtctcggcaaagtcggtatgtcccgtaaaataagcagagcaggaaagccagtaaaagaaggtgtcgtcaccttcaaagccggttttatataatgatttgagccatttatatccgatctcgtagcggccgacaagcgccaaagtagcacccaatttataacgctgctccattagcatcggatagacattggagagctgatcactcaattccaccactttttcgtcttctctttcataatagtagaaaacgagaagattgcataaggcgtgaagatttccttcattatgagaaagcacttcataagcggtttgcttcgcttttacaacgtttcctgaatagaaataggcaagcgcgagattgttgtatgctgaccaaagctccggatattcagctgtgatttcctcaagcgccgcaaccgcttcagcaagctggccgctttccagcaatgactttgcccgatcctgtttcaccagcagttcatcctgatcatacaacgaatcctcaatgccgtcgtctcctaaatcgagcaaatcaagcagactatcgttttcttcggcgaattcaccatccgggtccgcatcagaataagcggccgcttccttataagcttcctggaagagccccagatgggcaaagttattcgctttaaagtaatggcactccggcatttcggcctccagatttgccatgatatagtcaagaagatcgttcgactcttgatattggcccatttccgaataaatgaccgcaagctgtgaaagcatctctgaatcctccggctccaaatgaaccgcgcgctgaatcagtttgcttgcccgttttagattgcgctctttatacgctttcaagcctttatgaaaaaaatattgtccatcttgaagcagctggacaatttgtgcgtgatttttatgttcagaagtgtgttttcccacaactaccctccgttttatacaatattaccgtcagtagtataccataaatcgtaagcccctcaatagttcaaaaggaaggattgggaaaatccctcctcttttttattggctgattcgaccagaatttacccggctttgttttctaagtccgcattcattttcagctgctgttcagcaaaatccctataaagaccatgggaagccattaactcatggtgtgttccacgaccggtaatttcccctttttcaacaaacaaaagctggtccgcatctacaacggtagataggcggtgagcgatcacaatcgttgtgcggccctccatcagcacctcaagcgcctgctgaactgatttttcagattggctgtcgagacttgaggtcgcttcatcgagcataagaatgcttgggttacggagaagcgctctcgcaattgcgattctctgcctttgtccgcctgacagcataatgccgcgttcgcctacttctgtatcaaactgattcggcagctcctttataaaattgagcgcatatgccatctccgcggctttttcgatctcagcatccgtcacatctcgttctaacccgtagcaaatattttctctgattgacccggacattaacgggctttcctgcgatacatacccgatatgctccctccacgattcaagcgagtaagtatcgaccggctcgtcccccagtcgaatggtccctgcagtcggagtataaaaacgttcaagcagcttaaacagcgtcgttttccccccgccgctcggaccgacaatagctgtgactttacctgcttcaatgacggcgctgatttcttttaaaatcagctgatcaggcttgtatccaaaagacacgcgatcaagctgaatagggagatgcgcattttcaatttgttttcctgtcactgtatcttcttcttcctctgctaaaatctcaatcattcgttctgttgcaccgattgatttttgcagctgtgtgaaaaacgttgtaatctggcccatcggcattataatttgaaacaaatataaaataaaagccacgagcgctcccgccgtgagttcgcctgaagatacctgcatgccgccatatccgatcactgcgacaagcgctgccattagcacgagtgagataagcggaccgacaagtgattgaaccttagcttctcgaacgccaagcttaaataatgatgaaatccctgttttcccgcggccgtattcgacatcctccgcatttgaagctttgacaagtctgatttccgggagaatttgattcagcaggcctgtaaaacgggctgtttcatcttgtgtttcccgtgaaatggagaacattttccgtccaatcggcaccaaaataagagcggccagcggaacgaccactaacacaagcagtgtcagcttccagttcataataaacaagattgtcaatgatccaatgacagaaatgatgcctgtaataaatccgctgatatgggttgtaatcaattctttgaccaccatcgtatcgttcgttacacggctgactgtttctccggaagcatttgtatcgaaataagagacaggcagcttaattaatttcttccataataactcccgcagcccggaaatgattttttgtccattatagttaagcgcataggtggcataagcgcttaaacccgcctgaacgaaaaacaccagcgcgatcaaaccgatttgcgtgcctgacagatttgacatagaaaaaccatcgacaagctgcttcgttaataatggaatgagcaggctgaccagcgtggttactacactgagggcaagcgcaaaggcgagctttccataagaaggattggtccgtcttactaaggcaaaaaagggtttcaatttacttttagatttttgtttcttggttggcatatattttcctcctgtttcagcgttcagaaaggtgaaaagtcatagcaaaaggatgatttttactctttctcaatcatatcaatggagaaagactttttcagtatatttttgccgtgatcaaaataaaaatctcccactcattgtttgaataggagatttttgtgttagacatctttcactggcttcttttttctgtaagtcaatgttacatcctgctgtcgcaggtcttctattatcattttgtaccgatcaacttttgcggtatgttcttcttttatcatctgaagggcagcttttcgtttttcgctattagactcaagctctttttttattttttttacaatcaaccctttttgccctttgatttcctcttttaatgaagactcaaatttctttgtcaggctgagaaagtcgttgatcggttgattgagggtgcccgctttccccttcatttcatcttgggtaagaaacatataggtcgttgatacaatttctgtttcactttctgaaaataaggaagtcactcttcatattcctcctaagactgaaaatcaaataactgagaaatcatttcttctttttcaaacagcttttcaatactctcgcggatatttttgataaaatctcttttttctgttgtctgtttttttaattcagcaacaattccatcattagcaggaagcgcacctgtgtggaatgattcatgaactgagattttctccaatttatcgaatgtgtggctgaaaccagctgcaagccggaattgaagatcgaaggcataatgcgaagggttttcttccatatgatgaatagccgtgatgatcgcctgctttttgtctatgaagtcttcatcgatttcctgactgtaaaccttctggtacttagaaatcgcatcttccatatcttcaacgattttcataccgttttgatagattctgacagcggatgagagattgacttgaatcgtttctcccgagccactcttccctgtaaaataaatatcggagcctttatagctgaagcctttttcctttgacaaggcgttgagcatttgaacgatgctgtggccgtcgacgataagttttagtgcgtcttttgtttctgtgtcgagtgttttcaatgaggacagaattgattttacatagtccactatttcaccaacgtcttttaaagcttgcataaattggccatattttagatggtctatgaaatgttcgtaccgtgactctatgcctcgcatactcgcattaatattcgttaattcttttttgatgactttcttttgcgtttcatcaatataaccattttcagctaactgatctacgaccggtccgctgtttctcaacaaggtatgaagaaaacctaaaaacgacggcagttcctcttttattcggccatacatttgcttaacatcatcaaaatgctcatataggacacttactttctttaaagcgccgtctgtgtttttcactttttcaatcaggtctatgtctatcccgctggctgcctttataaaaccgttcaagccgtctttttcatagtcatccttatatttttgaaggaatttttgaattgacctcacatcttcgtcaggaaccccatccataatgtttcggatgccttttacacttgtatttgtatctgccatcttcacatcaccgaatgtaataaaatcggccttgccgctgactccatacagcgggtcatcttttgagatgcgctgagtgatgtttgttgttacgcctttgtcttcataatatttttggatttctttttttaacttttctggcgggatggaatctatatcttcatatttataactaaatttcctaataacatatctatataaactttcatcagtttcaagtaattgatcaatattgacttgagctccatttaccccataaacttcatcatattctccatcaatcaattgcaccataacttggttattatttgcaagtgaatgtcctaaggcgaatgtttttaaatcctcagagttacctgctgctttctttgctttgttagtaaactcctttgtagcctcatactgactatgatcaattcctaaaaaaagaccaaaaaagttatatgaccaatccttattatcggcactaccttctgaaataatctgaagctgatcaatatgttttttctcatctattatatggattgccgttccatcgtaacctgattctctggtcgaactttgtatacttgtattctgatttacaagttcattggaggtgtaaatttcaattttcatattctcaggaagatcgtggtgggtttcctctttataaattctgcgtatatctgcttcgaaatccttcttagctttcttaacttcactcgcaatagttgaggcaaacttttgtttatagtcatattctaaatcaattaaccttaactttacgttctcattctcaaatacatttttatttcccatcttatttctcctttttatctattaaaaaggtgatagaattaattaatttctcaactttatttttagccttttcttcatctaaggagcatggttgattttcatttttgcatccaagggtaaaggcgtattctactcctaggttatcttcctctgtagacttaacatatccaaaataactgtatgaataattatattttctatcaatatcgtcaaagatgtcttttttcttggcagtgtaaatatccgttttctttttgctgctttttttgtattcgcctttataatcattttttccactaacaatatctagcattgtcttaggttcattcgcaaaactttcttctttgtaatatgttacatggccatcaaacattacattggtgtctttatcataactattaaatccaatactttctttgtttttcccggttaacgatgatcttcttgatagatactttccatcctccggaaacaacatcctaaaccctttcagcttagattccagcaaataatatcctggttcctcttcttttgttgacaccatgtactctctcgttttctcgtcctgaaacgcaggtacttgaggcagatccttgggatccatgtcttttggttttaccgcttctgttttattgtcatttgtgctgtttttatcattgtcattcatactgcatcctcctgtcagggcaagtaataagctgaagcaaataaagatgatctttttcattacgaacctccacgggttttgtgagaatagtattctatttttatatcaaaaataattctattgacctggttaagagatgattatttcatcctttttcatgttacatcatggcggaatttggataaataggaaatgagactcggttttgatctccttttattaactaatcatatataacacccaatataaatctaaatacctattacttttttcacaaaacaaaaagagccgtatcatccggctctttactcttcaatctcagaatggcgttttttcaatacgtcaagcacatcatccagcggcagggattgttctctgagcaggacaagcaggtgatacagcaggtctgccgcttcccatttgagttcctcatgatcccggtttttcgcggcgatgatgacttcggatgcttcttctccgacttttttcaaaatcttatcgacgccttcacggaagaggtacgtggtgtaagctccttcaggcatttccgcttggcgttccgcgatcacccgctccagttcgttcatgatgccgaatcggtccgcggcctgttcttctgtttgttcctttgtaaaacagctgtagctgccagtgtggcatgccgggcctgacggttctacgagtacgagcagcgcgtcttgatcgcagtcataccggatacctttgacggcttgcgtgttccctgaggtttctcctttatgccataacgcttggcgtgagcggctgtaaaaccatgtttccttcgtttccagcgttttttcgtacgattccttgttcatatacgcaagtgtcagcacttctttgcttgccgcatcctgcacgatagcaggaattaatccgtcctcgttaaaacgcagttcatctgcctgtttcatctcacattcaccccgtactctttcaagtatgatttcacttctttaatcgatgtttctttataatgaaaaattgaggcggccagcgcggcgtcggcttctccttttgtaaaagcctcaagcatatgctgtgcgtttcccgcgcctcccgaagcgataacagggacggggacagcttcggaaacaagctttgtcagcgtgtggtcgaaaccttttttctcaccgtcggagtccatgcttgtcagcaatatttctcctgccccgcgtttgacgccttcttttgcccacgcggtgacctcccaatctgttttctttctgccgccgtgcgtatagaccttatatgtgtcagattctttgtcatacttggcatcaatggcaagaacgatgcattgcgaaccgaaaaactcggctccttctgcaatcagctcagggcggagaacagctgccgtgttcaccgacactttgtccgctccggcacgcagtatcgttttcatatcactgagctgattgatgccgccgccgactgtaaacggaatggcaagcttcgcggcaacctgctccacaacgtcaaccatcgttttgcgtccttcatgcgaggcagaaatatcaagaaaaacgagttcatccgcgccttcccggtcgtacacttccgccagttcaactgggtcaccggcatccttcaattcgagaaattgaattcctttgacaacgcgtccttctttgacatcaaggcatggaataatccgttttgtgatcatttgcgcttcaccctttcaagcgcctcacacagcgtaaactgattggtatacagcgcttttccgatgatcgctccagagacgccgtccgcctcagagcgggcgagagcttcgagatccgcgacggagctgactccgccggaagcgatcaccgatttccccgtttccttagcaagctcgaccgtgcttttaacattggggcctgacagcattccgtctgtcgcgatgtcagtaaaaataaagacttccgcaccttcattggctagctctttgcccagttcagttgccttaagggttgatgtttccagccatccctctgttgaaacaaaaccgtttctcgcatccagtccgattgcaattttctcgccatattgtttcagcatttttttgacaaacggagggttagaaactgctgagcttcccaggatcacccgatcgactcctgctgataaatattcatagacgtcattttcggaacggatcccgccaccgatttcgactttcaggttcagcttttgcgtaatctcaatcacatggcggtcattcactcttttcccttctttggccccgtcgagatcaacgagatggatccattcggcaccctctttcgcaaataactcagccatgtcgtacggtgaatcgccatatatcgtttccttattataatccccttgaacaaggcggacacatttgccgtttctcatatcaattgccggatataatgtaaaagcactcattttttcaccttctgttctgctgccattttcgtaaattgagttaaaatagacattccgaccgtgctgcttttttccggatgaaattgggcgccgaagacgtttctttttccgactacagcaggcactcgtacaccataatcggcgcttgccagaagcgcgttctcctccatcccgtcaatgtaataggaatgaacgaagtaagcgtagccttgttctgtttcagacagcagcggagattcgttatgaaaggaaaggaggttccagcccatatgcggaaccttcagcttgtttcctttttcatcttctgctttcagcctgactgcttttccttttaacagcccgagtcctgaagcggtgccgttttcttcgctttcttcaaataaaagctgcatgccgaggcagatcccgagaagcagccttccctctgagaccatatcgtgaatcaattgatcaagcttcgtgtagcgcaaattgtccatcgcgtctccaaatgaaccaactcccggcaaaatgaaggcatcagcttctttcagctcctccggcttttcagaaacaaaatacggcacgccgacacgttcaagcgcctttgagacactgtataaattccccattccgtaatctatcacgccgatcatttacagcatccctttcgttgacggtattcctttaactcgcggatcgatcgttgtcgcttcatcaagcgcacgtcccagtgctttaaaaacggcttcaatcatgtggtgggtgtttgtgccataatgaacgatgacgtgcaggttcattcgagcttcgagcgccagcttccacaaaaattcatgtacaagctccgtatcgaaagttccgactttagcagccgggaaatcagcgcgcatttctaagtgcggccggttgcttaaatcaatcacaacttgagcaagtgcctcatccatcggcacaaacgccgatccgtagcgtttgattccttttttatcgcccaacgctttgagcagcgcctgccctaagcagatgccgatatcttcagtcgtgtggtgatcatctatatcaacatcgccttttgcgttaatggaaagatcgaattggccgtgtttcgtgaataaatccaacatatgtgtcataaacggcacatctgttttgatatccgcttgtcccccgccgtctattgtaaatgccagttcaatatctgtttcgtttgttttcctgacgcgttccgcttttctcatttagaaatcctccgttctctcgcttcaattgatctggcatgggcttctaacccttccagtctggcaaaagccgcgatgctttcggcatgttcttcaaaggctgattgactgtaagaaataatgctcgatttcttttgaaaatcagttacgtttaatggacttgaaaatctggctgttccgtttgtcggaagcacatggttcggtccggcaaaataatcaccgacaggctcagggctgtatctgcctaagaaaattgcacccgcatgtttgatactgccaagcaaagcttccggagactgtgttatgatttctaaatgctctggcgcgagtgtattgacagtattaatcgcttccaccattgtttccgccacatatatacaaccgtaatctctcactgaagcttccgctatttctcttcgcggcaaggttttcagctgcttactcacctcggctgaaaccgcctcggccagcgccatggaatctgtgacaaacacacatgagctgagcttatcgtgttccgcctgtgacagcagatcggctgcaatttcgctcggaatcgctgtttcatcagccagcacgacgatttcactaggtccggcaatcatatcgatatcgacatcgccgaacacttctcgtttggcaagcgcgacataaatgttgcccggacccgtgattttatccaccggttcaatggtttctgttccgtatgctaacgccgcaatcgcctgagcgccgcccattttgtaaatatcttttatgcccagctcggctgcagcaaccaaaactccaggagacagcagaccgtctttttccggaggcgtgacgagaacgattctttcaacgcccgctacgagcgccggaatcacattcatcaaaacagatgaagggtatgcggccgttccccccggcacatatacaccggcggaatccagcgccgtcactttctgccccagcattgtgccgtcctttctgtgataaaaccaggaggattgcagctgtctttcgtgatattccctaatattttcgattgcctgcctaatcacctgaagaagacgtgaatccagtgaggtgtatgcctcctcaaattcttcttttgtgaccagcggactgtctatttcgatgccgtcaaatttcgccgtgtagctgcgaaccgcctgatcaccgtttgctttaacatcttctataatggaccggaccgtctttctttgctcttccgttccggcatcgatggaacgcttgagagaaagccgttccgctccgctgatggttttgatcttcattttgccgtctctccttccacaacgagagataggcgggatgccatttcgtcaatcacatcgtctttcatgcgatagcttaccgggttgacaataaagcgagaggtaatgtcacaaatgtgctccgtttcaacaagcccattttctttcagcgtctgtcctgtggaaacaatgtccactatccgatctgcaagcccaatgagcggagccagttcaattgaaccgttgagcttaataatctcgacttgttctccctgctctctgaaataactggaagccacattcggatactttgtcgcgattcttggcgctactccgctccagtctgtattcggaagtccggcgacagctaagtggcatttgctgatttttaaatccagtacctcatacacgtcgcgttcctcctccagcatgacatccttgcccgcaattccgacgtctgccacgccatgctccacatacgtagttacgtccatcggcttcgctaatatgaaacgaagattttcctccggcacatcgatgatcagttttctcgaatcttcaaactcctcagggagcctgtagcctgcctgcctcagcagccctgccgcttcttcaaatatccggccctttggcatcgccattgtgagtaacttacccattttgctcttcctttctggcaccgataaaataagtgacgtttgcaaaagattttgtcatctggtcgatattttctattcccgataaatcttgaagaaccactttgttccctttcatgcgttcttcattcgcataagcgatggcttgcgcccgctgctctttgctgaaaataacagcgtctatatcacaaggttcttctttcatatgaagggcttcaatcagccggtcgatccgaagcccgaagcctgttgccggtgcaggtgaatcaaaatggcccagcagcttgttgtaacggccgccgcttccaatgacaaaaccgacattctcggcgtacacttcaaataaaatccctgtgtaatagctcatgtggctgaccatattcagatccaggcggacattttccgtacatccgtaatcctcaagaatgtcccacagcgccttcagctcatcaaccacgctttttccttgcgcagaatcgacgatttcctcggcacgtccgcatacttctataccgccccgcagttcaaggagctcaagcagcctgcttttatcaatggaggaaagcgggagagacttgacatgctctctgtaaccgacgtagttcttttcatataagaacctccgcagcacatcagctcgttcaacgttcccgagcacctcaacaaacaaagcatccgcaatgccggcatggccaatggcaattttaaaggatgccagcccagcgtttttcaatgccccgacgactaaagcaatgacctccgcatccgcgctcgttgtgccgtcaccgattaactccactccgacctgctcgaactcagccggacgtccgccttcacgctcctgagccctgaatacatttgccgcatagccgactcttagcggatgaccgtgtttcagaagcttcgatgccgccacccttgcaatcggccccgtcatatccgggcgaagcaccaatgtcttgccgtcctgatcaagtagcttaaacagctgctgctcttcaattgctgactggacgccaaccgtatcgtaaaactccagtgtcggcgtttccataaattgatatccccatttatcaatcaaatcggttaacgatcgtctcaccttttttttcgtttcgtataaaccgggcagtgtatctctcatgccgtgcggtttttcaaacataaacatcaacccgagcacctccgctgttatcttatgaaggaaaattccgaatcctttagttcgctaatatgataatatgttagcagatgaaagaatgaaaatcaacgcttaacttcagtaaggatatttttagttcaaatatccttctcctcattatgaaaaaatcatgaataatgtattaaaggtacgtaatatctcaaattctttatgtttggcatgctataatacaaatcaaatagagaacaaggagataaagatgaaaacactgcgaactctatgtgtcctgatgattctttcaggcgttatttttttcggacttaaaatagatgcaaaagatatagatattccttttttgaacagccttaaaaaagtggtttctgatagcgatacagatacaggtgcgaatagcaaaaaggagctgaagggaagcgcaaaaccgctggatgtcatcctttacaatcaaatggacgcaccccggctctataacggctgtgaagtaacaagccttgcgatggtgctgaattacgcaggatacgacgtgacaaaaaacaccctggcaaatcaggttgccacagtgcctttgacatacagcagcggattaaagggtgatccgaatgacggatttgtcggggatatggcgaatggccctggtctcggtgtctaccatcgaccgatctatcagctggcgaaaacctatgcgggagacaaagtgtctgatctgactggaaaaagcatttctgctgtttatgaacagcttgaaaaaggcaatccagtttgggttattacgacagccaactttacgccagttgacaacatgcagacatggaaaacaccaaacggaacgatagagattacgtacagcgaacacagcgtcgccgttacgggatatgatgataaatatgtgtatctcaatgatccgtatggctataaaaacagaaaaaccgatagaacaagctttgaaaaagcgtggaaacaaatgggcagccaggccatagttattcaaaagtaaacgcctgaaagccgcactatgctctatcctgagcaaatacgacaatattcatgctttttgtttcaatcggtaagatcgattcattttccatttatcatccagaattatctttactttcaggctgtctgtttttatgattaaagcagattcagccttgccccgatctatgtgagagaagccggtgcaagtcgctgacgcttctcttgcaaaaaatgaaagatatccggggaggatttatcattgaaaaaattcgtgtctatcctatttatgttcggtttggttatggggttcagccagtttcagtcatcaaccgcttttgcagcagacaaagtggtgcacgaaacaattatcgtaccaaaaaatacaacatatgacgggaaaggacagcggtttgtggcagggaaagaattaggcgacggaagccagtcagaaaaccaagaccctgtttttcgtgtggaggatggtgcaaccctgaaaaatgtggtgcttggcgcccctgccgctgatggagtacacacttatggaaacgttaacattcagaatgtgaaatgggaagatgttggtgaggatgcgttaacggtgaagaaggaaggaaaagtgacgatcgacggcggttctgctcaaaaagcgtcagataagatattccaaatcaataaagccagtacattcacagtgaaaaacttcacggcggacaatggcggaaagttcataagacagcttggcggttcaaccttccacgttgatgtgatcatcgataagtgcaccatcacaaacatgaaggaagcgatattccggacggacagcaaaacaagcacggtcagaatgacaaatacacgctactctaatgtcggtcaaaaatggattggtgttcagcatatttacgaaaacaacaacactcaattttaaccaaaaaagtccgctgatgttattcagcggactttttcaatctttcttgcatttcttccttcgtatagatgatcctcatcggatttccgccgacaaatgcgccggcaggcacgtctttatggacaagtgttccggcggacacaactgcgccatctcctattttcaccccgggcagaatggtcgtgttggcaccaatcatcacttcgtctccgatcagaactgtgccgatccggtattcgtgaatcaaatactcatgggccagaatggtcgtattgtacccgatgattgtatttgttccgactgagatcttttccggaaacatgatatctggcatcaccatgagggcaaaggatgtctgatttccaaccttcatccgcagaaatgtacggtacagccagtttttcatccctataaacggcgtatatctcgcaatttgaatgacaatgaaatttttgacgacctttaaaaaaggtaccgtttgatagacatgccacagtgagttggcccccgagaccggatgacgatctgtttttctcacagattacttcactccaacgatttgtaatagatcactcattttctcaagcataaaatcaggctcatgcttcgccagcatttccggccctttaatcgtccatgcgactcctgccgtttttgtaccggcgtttttgcctgccagcacatcgtggtaattatctccgaccataatggcttcctcgggcttgcttcctaactgtttcagcgctaacagcacaggctcgggatcaggctttgcatttgtcacatcatcaagggtgacaactgtttcaaagaattcgccgattcccgtgagcttgaggcccatattgacagtatctcttaattttgttgtcacaattcctaatgtaaagccggctttttttaatgcatccagggtctcatataccgtttcatattcagtcacgagtgaatcatgcatgtcatgattgtacgctctgtacatagcgatcatatcctcgcatttatcagggtccatcgaagagaacgtttcaaaaagagacggcccgataaatgcaaggacatcttctcgtttatacttgctcggataataatgctccagtgtatgcaaaaaggacgcgataattaattcattcgtattaataagcgttccgtctaaatcaaacagaatcgtcgttacttgtttgtcactcatattgcttcctttccaaccgctgagggtttccattttttccacgtgtgcgcaatagccattgtcagcagaactgctgtggtgacacgaatcaaaagaagcggccagactggtatgccgagcggaataaagacaagtgtatcttccacgaccgcgtggcaggcaacgagaaatataaatgccaatgtcatatcccgcttgctcacgccgtcatcctcgacagctttgatcatgacacccgctccgtaggccagaccaatcgtcagtcccgccaccatcgtcatagacgtatttttattcatgccaagcagctgcgtaaacggcgacagccacctggaaaaccgatgcagccagcctaaatctcttaaaaactggatgataatcatcagcgggatcactattgccgccagctgcaaaacaccaagtccggctttcgttaatgcttctgccaacattcctagccagctgtctggcgccgcgctcttcgcagcgataaaaccgtactgcgccgtttcctttccgccatgccaaatgaggttgatgacgatggctgacacagcggccaaaccgatgcgcacggccaatatgacgccaattctgataccaacctttgcggcaactgtcgattcgataatcaagttatgacagaaagaaagcataacagctaaaataaagacttctttcacagataaatccaatgttaaaatcccggcaattcccgcatacagattcagcatatttcccagtacaagcggaatggccgcttcaccagaaagcccgaagagacccattaccggtgtgatcagccgtacaagccaatccatgacaggggtatgctgaagcaaagtgaccaatagcgttaccgggaaaatcactttacccagcgtccatgttgtttgaaaacctgctgcaagaccggccagaaagatcttcttcatccctcatcccctttgttgacgtctactccgcgtaccgctccttcgaatatcccttgacgcgtctgaagatgatggctgccacagccaaaacaatcaatacgattgaaatcacctgagcgatgcgaagtgaatcagtcagcattaagctgtcagtccgcattccttcaataaagtatcttccgattgaataccaaatgatatagatcaagaacatctcgcctctacgcaaattcactctgcgcagcagcagtaaaacaatgacgccgacaaagctccatagtgattcatataaaaaagtaggatgataatattgcccattgatatacatttgattgatgataaattcaggcaggtgcaggttttctaaaaaggctctgctgacagcctcgccgtgcgcttcctgattcatgaagttcccccagcgcccgatcgcctggccgagcaaaatgctgggcgcggcaatgtccgcaagcttccagaacgaaagttttttcactctcgaaaacacataacccgttaaaatggcgccgattaatccgccatgaatggcaatgccgcccttccaaatcttaatgatttctcccggatgtgccgcataatagtcccattcaaaggcaacgtaataaattcgcgcgcaaataatcgcaattggaatggcaaacaggacaagatcaataaacgtatctttctgcagcccccgtttttcactttccctcatcgcaatccacagcccgagcaaagcaccgagaccgataatgattccgtaccaatggacggctaacggccccagctgaaatgctatcggattgagtggttctatcgcttcattcatttaacgccaactcctattcttcttgttcaccgtcttcaatgacgtccgccagcttgttggtaaattgttcagcggcattcagccccatccgcttcaatctgaagttcattgctgccacttcgatgatgactgcaagatttcggcctgggcggacgggaatcgtcagttttgtaatttctgtatcaatgattttcatggtctcttcctcaagtccgagccggtcgtattgcttgccctgctcccagagttcaagattcatgacaatcgtgattcgtttattgcttctgaccgcgccagcgccaaatagcgtcatcacattgataatgccaaggcccctgatctcaagaaggtgctcaattaattccggagcgtttcccacaagagtatcctgatcctcctgccgtatttcaacgcaatcatcggcaacaaggcgatgccctcttttcacaagctccagcgctgtttcgctttttccgacgccgctctttcctgtgatcagcacgccgacaccatatatatcgactagaacgccatgaattgctgtggtaggcgccagcctgctctcaaggaagttggttaaacggcttgacagtcttgtcgttttcagcggcgatctgaggacaggcaccccatttttctcggaggcgtcaatcagctcctgcgggatgggcatatctctagaaagaataatagctggtgttacatcagtgcacagagaatccattcgctgttttttctcctcttcaggaagctgttcaaagaaagaaagctctgtttttccgagaagctgcacgcgctctctcgggtaatatgtaaaatatccggcaatttcaatgcctggtcttgataggtcactcattgtaatcgggcggttaattccttcttctccgctgattaattccaaattgaactgttccattacgtcttttgtgcgaacctttgccacgatatgttcctcctgttccgggctgccccgagcttgctcacaatactttcattttatcactttcaggcttgaacctaaaacagattttataaaaggcgggaaaacacctcagctggtctagatcactagtctgaaaaagagtaaaataaaggtattcaaattccagaaaggcggatcatctatggcagagagtcttcttatcaaagacattgcgatcgtgacagaaaatgaagtaatcaaaaacggctatgtcggaatcaatgacggaaaaatcagcacagtctcaacagaacggcccaaggagtcatattcaaaagaaattcaagcacctgcgaattccgttttgcttcccggcatgattgacattcatatccacggcggctatggtgcagatacgatggatgcaagcttttctgcgctcgacatcatgtcgtcaagactgcccgaagaaggcacgacgagctttttagccacaacgattacccaagagcatgggaacatttctcaagctttggtgaacgcaagagagtggaaagcggctgaagagtcctctttattaggtgcagaactgctcggcattcatttagagggcccctttgtttcgcttaaaagagccggagcgcagccaaaggagtggattaggccttcggatgttgcgcttttcaaaaagtggcagcaggaggcaggcggactgatcaaaattgttacacttgcgccggaggaggatcagcattttgaactgatccgccatttgaaagacgaatcgattatcgcatccatggggcacacggatgccgattccgcattgctgtcggatgccgcaaaagcaggggcgagccatatgacccatctgtacaacgcgatgagcccgtttcatcaccgagagcccggagtgatcggaacggcgctggcccatgatgggtttgtgacagagcttatcgccgatagcattcactcccaccctttagctgcaaagcttgcttttttggcgaaaggcagcagcaagctcattttaattaccgattccatgagggcaaaaggcctgaaagacggcgtatatgagttcggcggccaaagtgtgacggtaagaggacgaacagctcttctttcagacggaacccttgccggttcgatcctcaaaatgaacgaaggcgcacggcatatgcgtgagtttacaaattgctcttggacggatatagctaatataacttctgcaaacgcggccaaacagctgggcatctttgaccgaaaaggcagtgtgactgtgggaaaagatgcagatttggtgattgtcagcagtgattgcgaggtgattctcaccatttgccgcggaaacattgcatttatatccaaggaggctgaccagatatgaaagtaatggaatgtcaaacgtatgaagagctaagccaaaaagcagccagaataacggcagatacaatcaaagaaaaacctgatgccgttctcgggttagcgacgggcggcacaccggaaggcacttatcgcgagctgatccgcctgcaccaaactgagaatctctcatttcaaaacgtcactacagttaatttggatgagtacgccagactttcaagcaatgacccgaacagctatcacttctatatgaatgaccgtttatttcagcatatcgacagcaagcctagccggcattttattccgaatggaaatgcagacgatttggaagccgaatgcagacggtatgaacagctagtcgagtccctcggcggcactgacattcagcttctcggcatcggccgaaacggacacatcggctttaacgaaccgggaacctctttcaagtcgcgaactcatgttgtgacattaaatgagcaaacccgccaagcgaatgccagatattttccttccatagacagcgttccgaaaaaagcactgacaatgggaattcgaacgattctctcaagcaaacgcattctgctgctcatttctggaaaaagcaaagcggaagctgttcgtaagctgttagaaggaaacataagcgaagattttcccgcatctgctttgcacctgcattccgatgttacggttttgattgatcgtgaagccgagtcattaagaccttgaaaggaacatgctgacttatgaatatcaataaacaatcgcctattccgatttactatcagattatggagcaattaaaaacccaaattaagaacggagagctgcagccggatatgcctcttccttccgagcgcgaatatgccgaacaattcgggatcagccggatgacagttcgccaggcgctttctaatttagttaatgaaggcttgctctatcgcctgaaaggacggggcacctttgtcagcaagccaaaaatggaacaagcacttcaagggctgacaagctttaccgaggatatgaaaagccgcgggatgacaccgggcagcaggctcattgattatcagcttattgattcaactgaggagctcgcggctatattaggctgcgggcacccctcctctatccataaaatcactcgggtgcggctggcaaatgatattccaatggcgattgagtcctcacatattccgtttgagcttgcgggtgaattgaacgaatcgcattttcagtcgtcgatctatgatcatattgaaaggtacaacagcataccgatttcccgtgcaaaacaggagcttgagccaagcgctgccaccacggaagaagcgaacattcttggtattcaaaagggagcgccggtcctattaatcaaacgaacaacatatctgcagaacggaacttcttttgagcatgcaaaatctgtatacagaggcgaccgttatacatttgtccactatatggatcgtctttcataaaaaaaaagcctccaaccctttttaaggattggagacatggcgaaaatcaaactggtctggtgctggacgatatgtctcttttttcgtcttgaacttccagatcggtgatttcgttttgccattaaaactgtcttccactataatgtaccaataataaacagactgcggttcaagatgatcccagcggaattcagctgtatccccgctcttcacttgctcccgttttccgagctcttcattggtatatacgttacattcaaaataatcggtttccacctttttgattcttggcttcaaatcaagcgaaagggaaaattcatccttgttgccataggtatccgtatcatagtaattcttatcctttacatacggagaatacgtcgatacgtgcaccatgtcattggcctggtcaaattgaagcaaacgcaaatacccttgaccgccttctggcccgccctgataatcggccagcatttgatgcacaagacgatccggcttcccatcaccatcatcatccagctcatctgtttttctcatcgcactatgataatgcccgctcaataccatcacgacattcgggttcggctttacgatttctttgaatattttctctccgattgggcttctgtttccgctgaccagcaaatactcatgaaaagctaaaatggccatccggtcagggtgtttcttcagcacctgattcatccacgcgatgtcttcatccgtaatgccccatcccatgtacagcatgatataatcattgccgttgctagaaatcaggtcataatgtccgcggttatttttataggaaccgccataatgcaattttttatcaaaacgatcgctgccaaaatatttgccaaacaccctgtaggagccgtccttatgtccgacatcgtgattgccggccagcactccgtaaggaattccgctcttatccagaacggacattgaccgatcagcgtttttccactgtctgatatcggcggaatcatctacaatatcacccgtgtggaacacatatttgatattgagctgcttttgattatcttttatccattcggtctgtttatcaaaaatatgcggatagctttcggcgtaatactgtgtatcagacatccagacaaatgtgtacatatccttcgcaggaggaatttcatcctgtacaatcacattcattttcgactcccgtacaaaatcggcggcaatcacagacgctttcagcgtaaacggtttgtcatccttcgcgacgaagctgtcaacaggctgccattcgtttgtccgataattccaagcatacatcgtcacctttctccccggcaaagaactgcccttccagaccgcttctgccagatcattctcatcaattgatggatcaaccgtcacttcaaagcgatgataagggaaaagctctttgttttctgtcgatactgtttttccatcagcagctgatacccgctccaattctttattcgtaaatggggtctccctttccggcacaaagcttttcggcggttcagtcagtgacgcgtgcttaaatattttcacatgattgcgcgctgtatattgaaatcccctataaaaaccaacatccatggcgtcattcgtcggatctttcacccgtacagaaagcttggccttatgcgtgtcggcttcgctgtctataacctccggctggtccggatgctctcgttcggttttaaatatcctctcaatcactgttttattgcccgcgagatccgttgctgtcacttttagagaatgttttcccggcaaaaggtcagaagatgatgtatgatatgggagtgtaatgctttctccatctaaagacgcttccgcttcctcaattttgctccatttatcatacatatccgcctgcaggataaggtttcctttatacgtttgcccctcggtgatattcggctcaatgtgaggtcctgaattatctacccgtacaaccaggctgacattttccttgccgtcgcttgcttgaatatggtgagcgccttcagaaagctttgatgtatcccactccagcagctgtgatgtaaatagtccgtcaggcagattgaactgaaattgccagcttttattcgagcgctgattatcgccaataaagagttccttctcaggagacaccctctgatctctgatcaccgttccatccgataacaccaatcgggcgtttttgactaagaagtcatcacggttttcagccgtatcaaacggagacaccttcgaacctgaacgtatcgtaatacgctgcagctgcttccctttccgaagcagtgtctctggcaatggaacagaataggtgcggtatttatttgttgtatcatcgaacaccttcagcactttgccttccatcgttaccgcgtttttaaaataaaggttcgttttcctcgtatcgaatgcaaaatatacttctttttccatcgcgggctctgtcacttgttttttcccgtcaatccacagcttaatgctgtcagctcgcccttctgtcgtggctttgagaaattgagttcccgacagcgtgtctctgttttcaatattcatccgcagaccgtgcgccttgcttgtttgtttaatatcaatcattttgaccggcgttctcgcttcattgatcccgtccccggccgccacataatactctagctgatccttcccgatcaattcaggcgaatacacaatataatggaagagattatcgttgcggtctttttcagcaagaattcgcttaaacggtttgttctcatccgtccggtagtaaaaggccgctgttttcactaggcttcggtcccgtatgtcagcccgcagctcaatgctttcagcagggcggacaggcttgcggtcagtccaatcctcaatgaccggcttttctttatcgagcttgattttccgtttctgctcgggcacctgtgcctgtaatacggttccgggagacggattcttttctccgattgaaatgttcagaagttctgcggttccgttcaacggatacttataaagcactgatgacagccggcgcagcgcatgtttccgataatgcgcaaccgaaatgtcctttcctgtattcgttgatatcacaacggcccgcggcctcgtattggccataccctctgtctcgtctatcaccgcgagattttttccttccgttaattgtgtctggtaatatcgattgaaatcctccgccgtcaattctggatgcccggcaggcttcagccagacgacaaacgtttcgccggatggtatcaagatcctttcatcaggtctccaaatcagatcggagtcaggcccttcttttgggtagcggtaacggatatggtagtctttaaaatcaatcgttctgtcagtcgtattaaaaatctcaataaattcataaccgtctgcgcgtcctatattcttcgtatcaaccgccagctctgtgatcagaagctccggaatatgggcaaggtcagcctggtatccttcaagcttcagtttcttcgtctccgactcaacccgctgcttcccattcgacatcacaatgtaatactcaagctcgctgttccaaatcaaacgtttcggaatttgtgccaaaaacttgcggaccgctccgggggtcgggtccatcggcaccattttgtagcccagctcattactttgtttataaaaaagaaaggcggaaaatgcttgatacgaattatcgcgaacttgagcctcaatcattagattgcttctcatttcagctttcacatcaatttgaggaggattttcaagcaagggtatgtaatgaggcgtctgaaatggttcctgctgaacaacaggaaaagctttcgattcatgatggccgccagacaaaacggaaagaaaagacaataatatagaagcaataaccgtgtatttcctcatcaaagcacctcccttttcatgtattttgcgtctgaacagggaagcttatgagttcatttttgtgcataaagaacaaaaaaacgtctgtctcttgaaaattccactattacctagtaaactaaggatagttaaccagttaacaattaaatcagagaggcaaattgatggacaacagcattcatgatgaattatttcaagctatacaacaattcgcattaaaaagggataaacgcgtctggcaaaaggtgcagataccatccattggcatatcctcacaacatcacgatcacctcaaaaaagactggactttgacccagcttcacattgtttcctgcatacataccagccaaaatgtgaacaacagcttcttagcatcccgtttacacatctcaaaagccgctgtttcaaaagcggttcatgctttgttgaaacacaatatcattacagtgacaaaaaagcctggcaacaaaaaagaaattttttatacgctaactgatagcggcaaagaactggcggggttacatgaacggcttcatcaaaaagcaaaggagcaatacaaacagctcttcaatgaattttcaattgatgagttgaaaacagtgactgcgtttattaacttgtggatcaagcatatgtaaaaaagcctcacccgcacgggagagacctttccatattattaagccctgtcaaatacaatatgaagtgagacgggtccgcgtgtatacagaccggactcagcataacaaaaatcttcctctaatctgatattccgcatcttatccagcacaatattagctacaatttcgatttcggttttggcaaaagctgctcctacacagttatgaatgccggatccgaaagcgagatgccgggcggcgccgctaaaagcgctcttgatgccaagatcttcccgatgaatattaaacacgtcaggctgttcaaatgcttcagggtcccggttagccgcaccgatcatacaaaaaacaatcgtatcttttttgatttccataccgccgaccactgtatcttgggacagctgccgcggaatcagctgaaccggcggtttataacgcaatgtctccgcaatggctctcggaactaacgaacggtcagccaaaacatcattcatctgctcaggattgttgagcaaatggtagatcatcagtgccagcgtcttatcagccggttccgttgcggctaacagcacattaagaatcagtgcgagtatatccttgtccgacatcgccatgccttcatattcagaagtacataggatggaaattaaatctgatcccggattgacgcgacgttcttcaatgaccggcatcaagtattgggaaagctgttcgctgcaccataacgaatgtgcccgcgcttcaggagattgagagatactcgtgataaaatcggcaactccgctatgccactcagagattttttcatggtctcttttatccagcccgagcatgtccatcgtgacgcacaccgcaaacgtctttccaaaatcattgacgagatcaattttccctctttcaagataaggcgctaacaagttttctgcattttgtttaatcaatggagacagatgatccagtgcgtcaccgatgaagcttctcactacaattcttcttttggcagagtgttcttttccatgcatttgggccagcacagggcctcgcattactggttcggcacgctcaacaagtgatttcgtcgtgaaaatatccggatgctgaaggatatagcggacatcatgatagcggctgataaaataactgtctatcgactcttcataatgaaccggatcttcctcccgcagttgtgaaaaataagcatatggattgttttgaaattgatcagaaagcacactaaacaatttaatcgattggctcatgttttactccccctatcatccttcacatgtgatccgtttctcagaaagcatctgcgccatttcctgtacaatgagatacccgtgattcgaccgcatacaaatagaaaattcatggttactgatcttctcaccgagcttccacggacgatgataagcaaggagcgtctcttccacctctaaaatatccggagctccgataaaaaacggcagctcagctatgacatattccacagccaaattcagcatatcctcactgacttcttccatcatcaaactgacgccccgtgcacgcccgattatcgcttcacgagacatgtccaaacaagcatgtcgaaaatgaggctgctcaaaaaaagcatgttcaacttcttgtctcaacagctggtaggctttgttatccataaaatcagaaaatgtatgaatcgccttcggatccccgccatgagccacaagggctctttctgcaaatctcctgtttcgtgatacctctttccttacttttcgttcagcctttcctctcggagttccaagcgcttctagaagattagccgcctcatgccctgcaagtaaaactgaaacgcttttaaattgagctttcgcccatccaattaatctgtaaatataatcctctgaaaacctgctgttaaatgggctgatccccaccaaaacatgcctgcgccgttcaaatatttctctgcagttttctgttaatgcctcagcaataaaatgcacagaccttctttccgttaccattccggtcatctcattcacccctaaaacttatcccgctttaagtcatcaccctcaaatacaagatggaatagctagaacaactgaacaagacgaatggcaggcagcacttaaagtttccaaatgttttttaaaattttaattactatttccatttcacatatcatgataaatgtttactagtaaacattagtcattttatcccttttccttccaaacgtcaatatgatctgtgcccaaatatttgaaaataaatgtaaacatcacattttccacacactttttacacgcatattcagcatgacagatcaacaaatagtctaaacaccaacaattgacaacgaaaacaagaaaagataaaatgaaattgttcaccagtaaacaatttgttttattgtttcatcgtaaactattattactaagaaagaaggtagcctatgtctgatttgacaaaacagatgatatacgacatatacgtgagactgctgcaccttaatgaacaaaaagcgaatacttcacttcagcaattttttaaggaagccgcagaagaggatgtgattgatatccctaaaaacatgacaagcatacatgtcattgactgtatcggccaacatgaacccattaataatgccggaattgccagaaaaatgaacttatcgaaagcgaatgtaacgaaaatcagcacaaaactgatcaaggaagaattcattaacagctatcagctgacagataacaaaaaagaagtttattttaaattaacccgtaaaggcagacggattttcgacttacatgagaaactgcataaaaaaaaggagctggctttttaccaattcctcgattcattttcacaagaagaacaaaaggctgtattgaagtttctagagcagttgacgtcaacacttgaagcagaacaaaccgatgggactccggacaaacctgtaaagtaaacaaaaaggcggtgtacactttggctcatacaaaatcaaaggcagtattgatcttatacactgtttgcttcagtgcattttttgcatctttaagccagaacatttattcacctattcttccgatcattaaagaatcattccatgtttccacagctatggtgaacctgtcagtctcagtttttatgattgtgacagcaataatgcaaattatattaggagcgatcattgattttaaaggcgctcggatcgtcttgattaccggtattctggcaacggcagcagccagcatcggctgtgcggtgactactgactttactttgtttctgatattcagaatgatacaggcagccggttccgcagcactgcctcttattgctgccacaacgatcggacagctgtttacaggcaatgaacgcgggagtgcaatgggaacgtatcaaatgctcctgtctgtcgcaccggctattgccccagttctaggaggattcataggcggagcagccggatacgaagggattttttggatacttgcggccatctctatcgttttgctggtgacaaacagcatcacctttcctaaagattctccaactgaatctatgcagcaagccaaaggcaatgtgttcgctcattataaatcaatatttacaaatcgaacagggaacgtcattttgactttaagttttgttctctttttcatttattttgcagtaattgtctacctcccaatattgctgacagagcattaccatatagatgtgggtatagcaggactgttatatttgccgctggcgctgagcacgattgcaggtacgtttctgtttaaaagaatacaggcaaaaatcgggctgcacaccttgtttatcggaagcaatgtgattgccgcctgcagcatcattttatttgctgttacacattccgtttctctcgttctcatggctctgacgctggcactgtttggcatctcgatgggggttattcctcccttgtactctacaatgattactaatgaatttgagcacaacagagggagtgcaatcggaatgtttaactttatccgatatacaggcatggcagcaggtccgatggtatctgcctacttgctcacaatgatgccgtctgccatgtcctttagcctcctaggccttggatttgccgcattgagcttttgccttcttccgccaatgttttcgccgcagaagcgcacgaaacaaaaaaagcaccacatgtaaaaaagctgcctttgcgggcagctttttttatttttttctaagcggctctaaaatgcctttttgaatcagcaaatggaagaccgacaggataacggatgcccatatcgctgtgccgaagccgtcgatttgaaagctgtcacccataatggacgcggtcatcataagcgtgatggcgttaatcacaaacaagaagagtccaagcgtcaccatggtgaccggcagtgtaaatataattaaaagcggtttaatcagcacgtttaagatcgataaaatgaggctggcgataatcgctgccccaatgctgctgatatggatggagtcaatatatccatcaatgacgattaataacaatgcattgactaaaatgctgactgcccattttaccatgtcatttcatatccctttctgacgggacgataaaaatccaaatgatataaatgagcaaaaccggcaagacacttgtcataatggctaagatgacagttatgactctgaggagtgatgcgtcccaattgaaatattccgcgagacctccgataacaccggcgattttcttatttttttctgagcgataaagcttattcattcgatcacctctgtgagtactttagtttgatggcgcctgttagtgattctgagaagacggtgatgttttgatcatgtgcctgatttgaagtgaacatcatttctttttgaatcgtatcatttttttccttcagcatctctacatccattaattcatgggacagcgtaccaagattgcttttcagctctgccttcactgcgagatcgtccggaattgcaagctctacatttccagtcgttgtttttgcataaatggagcggcagtctgattctgttacgttaatcgcaatatttccgttaaagctttgaacgtcaatggattcgcttttccctcggagatcgatcaatccgttaatggtttccgcttctatcgtaccgcagctgtggcttgcgagcttaatttgcccgttggccgtttcagctatggctttttcggctgttaaatacgagaacgacagcacgccgtttgtcgttttcgctgagaactcttttacatgtaaatgttcccctctgaccggaccgttaaacagcttcacccgaatcttatcatactccttctgaggaatatacaaagtgacattcgttttcatcgtctttttctcagtacggataaaaaacttattacctttgatttcacattcaatatgctgaagaaatgcgtgtctcgccgcatcctggttgtcagcgcgatataccttcgcctggcattccgctctgatatcgtcatcttcccaagggacgatatttacgctgccattggcaatttgcagctcaacactggaaaagtcagtatctttaaattgaaaaatgtgctgaacatcatacgcatggccaaagtttaaatcaaggtcaacttccttgacctttttcacagcagaatcaatccagtcaaacagcttggctcctaaagacggtttaccgctttctttttttgccgttgtaaatggctcttcctcgtcatgaacgtgaactgagagcgctgtgattttctcttctttttccttgtagtcgctgtcaagcttttcaatcagtgtcaaagcttcttgtgctgtaagctttccttcctcaacaagcttaaggattcgttccttttcttgcttcattacgatctcctccccattgtctacttatgctgcacgcaggaccttaatgccctgaatcacattccaaatgataatgccaatgacaactaagaaataaataaccgctcccccgatgattacaaatacaggaagcaagctgtctccatcaatcgcaacggctccgccaagtaaagcaataaaaaggaacagccagccgacaaacggaacaatgtgagaaataagagagcgtatcgcatggcgttttgtttctttctcatttacaacaaaatatgcgacaatcggcacaatgattggcgcaatgaacacactgaaataacaaagtgatgcaataatagcttgattacggttcaattcattccacactcctattgtgaattgtccatgacaaaagatcagggacgttttacttatttatacgtttaaaatctcttcaggtttcaaattcattctttagacatgctccgatttacggaaattggattttaaaaagttttagaagtagaatcttccggctataccgattacaatatgtaaaaagcttacggcaaccaaggaggctggacaagcaatggagaaagatcccagtgactatacagtaacacaagaatcagtgttaaagctgattcaggaacaaaaaagaatgaatcgtgaaatgatcaccgagcttgagcagattcacggacccttcccgatctctcacgatatccaatatataaaagtgctgctcgacagcagcaacacacatattgttcaagatttaatgagtgtaagtaagcagctgtataagaagactttgtaattgcggaaaacatatcattcattataactgaaacaaagctaaaggttagatgacaatatcttgccttttttgttttgaaaaaacaagtgattccctggctgtcacaaaatgattgtaacaaaaaaaagcctgccggcacatccagttaatggactctgtcggcaagctgtaactatcagaaagagatagccgttcaaaattaacgtaacaattgaagcacgttttgcggctgttggtttgcttgagcaagcatcgcttgagaagcttgagaaagaatgttgttctttgtgaaatcgctcatttctttcgccatgtcaacgtcacggatgcgagactcagcagctgttaagttttcagaagaagcaccaaggttgttgattgtgtgctctagacggttttgtaccgcaccaagtttagcacgttggtttgaaacacttgtaattgcactatcgattttaacaatctcagtgtcaaaactaaaatcatctgctgaaacatcgataccttttactcctaaagttgttgcatccatgttaccaattgtaacattaatattttggccagcatttgcaccaatttggaatgtaaatcctgctgtttcactaccgtctaaaagtttttttccgttaaattcagtacgttgagaaattccatcgatctcttcagttaaagcatccatttcatctttaattgcagttaaatcttcagtttgctgtgtacctgtgtttcctgcttgaacagtaagttcacgcatacgttgaaggattgcatgggtttcagtcaatgcaccctcagctgtttggataagagaaattccgtcttgagagtttttagaagccatttcaagacctctgatttgtcctctcattttttcagagatcgctagacccgcagcgtcatctcccgcacggttgatgcgaagacctgaagaaagtttctccatgttttttgagctcgcactgttgtttgaagacaaacggtttagtgtgttaagcgctgcaatattgtggttgattctcatgtgaaaaatacctccatgtgtatatgtttttgaaatcaaagacttccttttctttgatttctggcgtatcagattccaataaagcttctaacctatgtagattcagttattgcttaaggatgcctttaagccccttaatagggtttgtctgcttaatttggaaatcatcatccgcctttcaattcatatatcgacagccatttgtaaatgtttaggcgttttcccaaagaaattataccaaagacgaatctaaacctattatgccgtaaagaaaaagcttgcctgctaagcccaaggatggacttgctgacaagctgtcccctcttaacagaggtttttttaagatgtagctgtttcttttgctttcaagagcgatttcatgcgtgttttgtcacgttcgataacaggcttcaaataacggcctgtatacgattcttccacttcagtgatttcctcaggcgttcctgacgcgacaatggttccgcccccggctccgccttccggtcccaaatccacaatgtaatcggccgtcttaatgatatcaaggttgtgctcaataaccagtacagtgtctccgttgtctaccaaccgttgcagcacgacaagaagcctggcgatatcgtcgacatgcaaacctgtcgtcggctcatctaaaatgtagagcgtgcgtccggttgagcgtttgtgcagctctgacgcgagcttcacgcgctgcgcttctccgcctgacaaggtcgtcgccggctggccgagcgtaatataacctaaaccaacatcataaagggtttggagcttgcgtttgattttcgggatattttcaaagaaagaaagagcatcttcaaccgtcatatcaagcacatcagagatgctttttcctttgtacgtcacttcaagcgtttcacggttatagcgtttgccgtgacacacctcgcatggaacgtatacgtcaggaaggaagtgcatttcaattttaataatcccgtctccgcggcaggcttcacatcgtccgcccttcacgttgaagctgaaacggccttttttatagccgcggaccttcgcttcatttgtctgcgcgaatacatcacgaatgtcatcaaatacaccggtgtatgtcgcagggttggatctcggcgttcttccgattggcgcctggtcaatgtcaatgactttatctaaatgatccaaacctttaatctctttatggctgccgggcttcgctttcgctttatgaagcttttgcgccagcgccttatgcaaaatttcattaacgagtgtactctttcctgaaccggaaacacctgtaactgctgtaaacgtcccaagcgggaacttggcattcacttttttcaggttgttttctgaagcacctttaatttcaatgtaacgtccgtccggctttcttctttcaggaggtaatgggataaactttttccctgataaatagctgcccgttaatgagtttggatcttccatcacttcttccggtgtacccgcagatatcacctgtccgccgtgaatgccggctcccggtccaatatctattaaataatctgctgccatcatcgtgtcctcatcatgttcgacaacaatcagcgtgttcccgagttctctcatatttttcagagcgctgatcaagcggtcgttatcacgctgatgcagaccgatagacggctcatctaaaatataaagcacaccggataagcgcgagccaatttgagtcgccagcctgatgcgctgcgcctctcccccggacaatgtacccgctgccctgctcaatgtcaggtaatcgaggccgactttgtccagaaagcttaagcgctccacaatttcgcgcaaaatcaaattggcgatctgcatatccttctcagaaagggtaaggtctttaaagaaggcaagtgcgtcggcgacagacagctcggtaatttttccaatgtggcggccgtcaatcagtacggcaagcgcctctttctttaaccgatagcctttgcacgtcggacaagatttctgagacatatactgctccatttgctcacggatgaaatcagagcctgtctccttatagcgtctttcaatgttgcgcaatacgccttcaaattgaatttcaccttcgcgtatttgtccaaaatcattttcatatcggaaataaatcaggtcatccccgctgccgtacagcactttatccagttgatgcttcggcaaatctttgaccggcacatccatatcaatcccgtagtgggtgcagactgcctcaagcagctgaggataatattgtgagctgatcggtgtccaaggggcgaccgcattctccttcaatgacaaatcttgattggggatgacaagatcggcatccacttcaagcttcattccgagaccgtcacacgtcggacacgccccgaacggactgttaaacgaaaacagacgcggctcaagttcaccaattgaaaatccgcagtgcggacaggcataatgctcgctgaacatcagctcttcctcaccgatgacatcgatcataacccgtccttcacctaaacgaagcgccgtttccaatgaatctgacagccgggctgccacgccttctttcacgacaatccggtcaatgactacctcaatggaatgcttcttgttcttttctaattcgatatcgtcggaaagctcagccatctcgccgtcaattctgactctgacatagccttgtttcctaatctgttcaagcactttgacatgagcgccttttcggcccgagacaatcggcgccagcacctgaagcttcgttcgttccgggtattccagaattctgtccaccatttgctcgatggtctgggatgtaatctcaattccgtgttccggacaatgaggcttccctactctcgcatataaaagacgcagataatcataaatctcagttaccgtaccgacagtagacctcggattgcggctcgttgttttctgatcaatgctgatggcgggagagagccctcaattgcatccacatcaggcttatccatttgccctaaaaactggcgggcataagcagacagcgactcgacataccgtctctgtccttcagcatatatcgtgtcaaaggcaagggaggatttacctgatccggacaaacccgtgacaacgacaagctgatctctcggaatcgttacatctatatttttcaggttatgcgccctggctcccttcacctctatccgatccatagccatttgttcatcatccttccgcttttagctctaaaagtaaatcgcgaagctccgcggctctctcaaagtcaagcgccttggcggcttccttcatttcatgctccatctgttcaacgactttctggcgttctttcttcgtcattttcgacagcttcggcgcggcttttgttttgtattccgctttatcctcagctgctactgtggcacgaatgacatcgcgaatttctttatttatcgttttcggcgtaatgccgtgctcttcgttaaaccgctcctgctgctcgcggcggcgttttgtttcattaatcgcaatttccatagacttcgttattttatcggcgtacataatgacgcggccttccgcatttctcgctgcccgtccgatggtctggatcagcgaccgctctgaacgaaggaaaccttccttatccgcatccaaaatcgcaacaagggatacttcgggaatgtccaaaccttccctcagcaggttgatgccgacaagcacatcgtacttgccaaggcgcaggtcgcggataatttcaatccgttcaagcgtcttgatctcagaatgcagatagtttactttaatgccgatttcttttaaataatcggtcagatcctctgacatcttcttcgtcaaagttgtcacaagcacccgttcattccgctcgattctagcttgaatttcgccgatcaagtcgtcaatctgaccttcgattggacggacgtcaataagcgggtcaagaagccccgtcggacgaatgatctgttcgaccatttcatctgtatgttcaatctcgtacggccctggtgttgctgatacatacacgatattgtgcatatgcttttcaaattcctcaaaacgaagcggacggttatcaagcgctgatggaagccggaagccgtgatccacgagcacctgtttccgcgcctggtctccgttaaacatgccgcgcacctgaggaattgtcacatgcgactcatccaccacgatcataaaatcgtctgggaaataatcaagaagcgtatacggcgttgaacctggaggccgcagcgtcaaatgtcttgaatagttctcgatgccggagcagaaacccatttcacgcatcatttcaagatcatatcttgtccgctgctctaaacgctgcgcttcaaggagctttccgttttcatgcatgaccttcagctgctcctcaagctccttctcgatattttgaatcgccttctccattttctcggcccgcgttacgaagtgggatgccgggaaaatcgcaacatgatctcggtcgccgagaatttctcctgtcagcgcatccacttcccgaatccgttcgatttcgtcaccgaaaaattcaactctgatacaatgctcatcacgggatgccggaaagatttccactacatccccgcgcacacgaaatgtaccgcgctgaaagtcgatatcgttgcgggcatattggatgtctacaagttttctgagcagctcgttgcgctcaatttccatttcagtccgcagtgacacgaccatttcccggtattcctcaggcgaaccgaggccgtatatacaagacacactcgcaataataatgacatctctgcgctcaaacaaagctgatgtggcggagtgtctcagtttatcaatttcatcattaatactagcgtctttctctataaatgtatccgtttgaggcacatacgcctccggctgataataatcatagtagctgacaaaatactcgacagcattgttcggaaaaaattccttgaactcactgtaaagctgtccagcaagggttttgttatgggcaatcacgagagtcggcttattgacttctttaatcaaattagacaccgtaaatgttttcccagttcctgtcgcacccagcagagtctgatgcttcttgccctcctgaattccttttacaagcttttcaatggctttcggctgatctccttggggctgatatttcgagactaactcaaagcgatctttcacaaaaataagcctccgtttctttaacgaaatcttcctatagatatagtaacacaatggaaagcaaaatcactaaaaatacgaactaaagttcggtggttttttatttccagctgtttttgtgtataaaaaacctgcttttaaaacgtaaaagcaggtattcagtctttatattcattatgtccgatttattcttcttttttctctgcagcttttttggccatatacagtccgccagccacaagagacacaacatccaatcctacaataaaatacgtttctgtatagccttttaaataagaggcaaacagcaatgcagctgttaaagcgatcgccacataatgattaaaggtgactctagtaaatagaacaacaagcataaaagggaaaaacaatgcaaaaacggcttttgtaatcaacaaaaaccctcctcagggattcttcatctgatctgattatagtaaaaaatgaagaatcggacaatcgtgcattcgctccctctactacaccataccccttttcagccaaaatcaatcactatatttgcattttggtgccggtcaaaacttattccatggtgccgctgttctaatcagcggcactttttttattacatcatcaagtccgccgccagattccgagaataaaagaaaataggcatacagtaccagtacggccgcatttttcaggataatataaccaacttaactattcattttatttaggactttctgcgtttgacagcattttcctgaaaacctacaattaaatgatagtgtttactatcattttttaaacacaggctccgcaataaaaagactagagagaaaaacaaaatgaatgaagaaaagaggggtttcaaatatgtattctgttttatttcgccaggcagaagagtccagccagctggctggagcaaaaggaatgaatttgattaaattgaccaaacacggtcttcctgttccggacgggtttattattcaaacgaatgcgatcgcacgttttatggaggacaaccagcttcaagagactagtgaaaacgtcgaaggcgggatcatttccggaacattttcggatgagctgaaagatgagctgactagttccttttataagcttagagaatcatatcgatccgtagccgtgcgttcttcgtctgcctcggaagatttagaaggcgcctcattcgcgggtcaatatgaaacctacttaaatatcaaaacagaggaagaatttctggctaaagtgaaagaatgctgggcttcatttttttctgggcgggtcagcagctataagaaaaaaatgaacaatcaaatcgcagagccgttaatgggtatagtcgttcaggggctgatcgattcagaaatgtcaggtgttatcttcagccgcaatcctgttacccatgatgatagagagcttttaatcagcgccagctacgggttgggtgaagctgttgtttcaggaagtgttaccccagacacgttcattgttaaaaaatcttcgtttgagattcaaaaagaaataggtgcaaaggaaatctacatggagtctgcggcagaaggaattgctgaaaaagaaacgagtgaagacatgcgcagccgtttttgccttacagatgaacaagtgattgaattggctgaaatcacaaaaaaaaccgaagacctgtacggatatcctgtcgatatagaatttggaattgctgatcatcaaatataccttctgcaagctcgtccgattacaaccattgatcaggacaaaaaggcggcagaagaaaaacgcagcttcatgattaccgacactgatatgaatgatttctggcttaacatggagtctaatattgaaggtccggtgagtccgttattttcatccttcatcgtgcctgcgttggaatatggcttgaagaagagcatgcaaaagtttccgattggtgtagttgttgatgaagtaaaactttatcgcggacatatttattccaaaaaccaaggagggcagcagcctccttctgaagactgcggcaaagagcttttcccgattttatcggagcatatgtatgacatcattaatcacacatacctccctttttaccggacactggaccagctcgcacaaactgagcataccgcagaaagcgcactggatgcttttcaaaaactaaaggccttttatctcacggcttatgaagagcacttcaatatcgttttcccgcaaatccttttaacaaacaaactgcaagcgatgtatcaggacattcaaggagagtccgaaaacgctcatttttacgagatgctgacaggaaaaatgaacaaatcactggaaacggaccgttgcttatggctattttctgtggaagttcaggagaacccgaaccttctggccatttttgaaaacaacaagcctgaacaactccaggagaaattggaacaaacagatgagggaagacacttcctgaagaacgtccatgaattcttgcaagaatacggatggagatctgttaaaagtcatgatctgattgaacaaatctgggtggaaaatccgtatttcgctctggccaatattcaaaattatgtccgtaatggctatcattttgacaatgaatttcagaaaacgaaagaaaaacgagagaaattatacaatgaattcttggaaaacatagaagatcccggtttacgcaccgaatttgaccgctattatcaatggacactgaactctgcaaatataaaagatgatcaccacttttatattgacgccatgctggatgccaaggcgagaatctttctgctgaagataggtgaattgctggcggaaaacggtgtcattcaagatcgtgaggacctttggttcttatatgatgacgaagtggaacaagcgcttcttcaccctgtatccctgcaagaaaaggctgaaaaacgcagacagatttttcatgagtatgagctggcccaagccccggcctacctcggcaccccgacaaaagaacagctcaaagcagctgaagaaattgtcggcgctgtgatagaggatgaaaaaaacacagagaatcatatttttggcattgcggcatcaagcggcattgcgacaggtccggtgaaaatcattcgggacgccaatgaattttctcaattcgcgcctggggacgtactcgtttgcaagatgaccacaccgctatggaccagcctgtttcaagacgccaaagcgataattacagacacaggcggcattttgtctcacgctgcgattattgcccgtgaatacggcattccagccgttctcggcacacgcacggcaaccgaaagactgcgagacggtgacatcatcactgttgacggtagcagcggcaaaatcacagttgtcagccggtcctgatgcgtccccctctttcttatacaagcggggcgggtgtatacttgtcctgccagtatactcgtgaggtgaaacgtattgagaccgacaaacaagagaatccttgatgctgccatgcagctgctcgtcaaaaaaggatatcgcgcaacaactacaaaagaaattgcagaaaaagcaaatgtaagtgaagcgacgattttcaggaactttaaaaacaaacaaggactagttgaggctttgctttctcagcattcttcaaacagaggcagcattttggaacaaacagaaggggatttgtacaaagacctgcttcatatcggaacctgtctcttggaggagctcgaacatagaaaagatatcattaaaatcagctttcgtgaaccggccatgtttcaggatgtcattaaccacgtcactgaatatccccaatctatgaaacagctattggttgattatctcaaaacaatgggtgagaaaggggttattcagacaggaaatgaagcggagcatgccgacgtgttcatgtcgattatcttcggttatttcattcaccgtctccacttaggagaccgggtcatatcaatgccccaggaaaaaatgctggagcacagcacagctctatttgtcaaaggaatttctgctgattaactccttggcataataaaaaggaggatcccaatgagctcaagaaaagaatgggcgctgatcgtctcgctattattgggggccattctggttcccattaactcaacgatgatcgcggtcgcgctctcatctatttcccatacgtataacgagtccatcgcaagcatcacttgggtggttaccgtttatttaatcgtgatggcagtcacacagccgattgcaggaaagctcggtgacatgtacggcaataaaacaatgtacttatggggagtcggcctttttctaatcgcatctctaggctgcgccctttcaccgagtctgctcctgttaattgtctttcgggcattgcaggctgtcggcggggcattgcttacgccaaacagcattgccattatccggcatgttgtttctgaaaaacgcctaccgaaagtgtttggatttttcggactgggtgcgggacttggtgcagcactcgggccttttatcggctctatactgattgacagcttcagctggcattcgattttttgggtcaacatcccgttcctcgccattgctttatttacggcattaacgatgtttcctcaatataaagaaaataaatctgacgcgccgctggatatcatcggctctctcttgcttgcaggcagcatcgtttccattatcctgctgacgaaaaatgaggctccatggggatatgcggtatacagtgtattgatacttctttttgttccgctttttttcagaagagaaatacgtacccagcaccccatcattgactttgcactgtttaaaagctcaacctttacaaatgcgaatctatcagtcttgttaagcaatttgatgatgtatgccgtcttattgattatgccgttatttatgacgaaccaatttgggcttaatacgtctaacagcgggatggcgctttctgtattttcgatcttcatgtcagccagcaactgggtgggcgcgcagctccatcacaaatggggagccaaaaaaatcatttttctttcatttgccatgatggctggtgcgaatctattatttttgctgttaagcagctcgcattctgtcttattcctcatgctctctcttatccttggcgggctcgcttccggagtcggtctgaccagcatgcaggtgtcatcccttgccacagtagaccccggaatgtcaggagtggcatccgggattttctcgaccttccgttatttcggaagcatcatttcatcagccttaattggcctgatttcgggatatcacatcctatttatgattctctttgctgtatccatcatcggcgtttttgtttcattgggcatcaaatctgatgaaacggcacggatagaaaaaaactcagcgtaacgcaaaacagcccggcatcgcatcttcctgcggtgccgggctgccttttatgatccagaagcggctgcttcgtcttcacggtcatcctttacgaagaggatgcccaattcatgatgttctccttcataagaagctcgctggtcaaaacggatttctccattcaaaccgataatttcaagctttacatatgcacggttatgctgaagcgcttcatagaaatcagaaacgttcttaaccggtatgccattgactttcgttatgatttccccgattttcaattccagatcctcagccggcgtattggggataatcccaagcaccattaagccctgatcccttttcgagaaataaaacggagccgcgttatcattcactctttgctttatggacaaaaaaatgcgccctaacaaagcagtacagaccgctgcacccgcaagcggcgtccacagtaagctcgctgcaccgagaactgcgacggcaagaccgagaatacaaacgcgtttcgctgtgatccttatactcgtttcaggcagcgatccctgtaccctttgtccaaatccgacaaagtaaggaatccatagaaaatgaaatgagccgccgggaacagtaaacacgggccaccagctaaggtgcgattctaaaccattgccgggcacgagaaggaacagcggcaaaagccaaacccggtttgccagctgctgtccgatcggcaaaccgcggctgcttacgacaagtgccggtgatgttctcacatgcgcagaacgataagcaaccgctccttcagtgataatcagcaaacctagaaacacagccacagccggccaaacaactgcaaatccttgctgaaatctctccagaaagggctccgcctgatatatttgcagtccaaaacctatcagcatactcacactgacgatatatgcagcagacatccagtttgcgcgaagagtgaacgctgccgctgcagtgataacggcaataatcgcaagtaaaccgagaggaatcgatattccgagtccacctaaaataactgacaaaagaagacctggaatcagtccctttgtatatgtaaatttcagatcatcataaatatctgctattcttgtatgaaaggtttttcgttcccgtttgattcttacatagccgaaagccagggttatgatgataaaaaaccagaaaagcgggtgtaagaagaacaagcccgcgctttttaacagttcaattccccattgaacagacactatctctcaccgcctcaagccaaacatgttactcatattctatcaaatattaaatggcttggatatcctcaggagagtttatctctcttgcgtcatccacagcgtgacattcgatagtgaaaaatcctttaaatagtggtttacatccacatccaataacccgctgattagatgcatcgacctttttatatctgtcagattaattcctaatcgcttatggtttttcattaagtagttaaaataatgtttggcgcattcctcattaatgtcatttactgattcgacattggtgtaattgaccaaatatctgctgaacagcataagaagacttagtgcttttgtagctgaaaatgttacgtcttgtgttctgtcttttaattgttccactaattcataatattttttttcacgcacaatacttgccctcttcaattgtgaacccccattttctttatacagataagcacgggccagtataagcagcagtactggagtgctaacaagcattctcgctaacgttactctttaaatacctgtcgttcagctgccattaacctgattactgttctttttagaaccttcttatattgtatgaagtaaacaaagactaggcaacttgcaaaagtttcattttaaatgcatattaactcgttagaaagtctctctcatatattgatatcgggtaataacagtcctttataaatgtttatttgtgaaaatttttttaatttcttgtcaaaaactcattttttatgtgacttatgatccataatctctttaagtacaaagaaacaggagatggaataccatctcctttaattgacaaataatgatttcaatgctgtttgaagctgcaaatcatttttgtcatctgattttttcttttctatctgctgatttaatgtctctgcagtgcgagtgtcgatcacaccggttttattcagcttgttttgatcctgaaaagccataaccgcttttttcatgtctttgctgaaatagccatcctcacgtcccggatcaaagctgagaccttttaacaatacctgcgcatgcttgacgtcttcattgttcatgtccactttaagcggctctttcagctgtaaaggcccagcggaaaaataatcgggctgcttaatcgcaatggtcggttcaattcctttcttatgaatccaatttccatttggcgtcagccacttgtaaagcgttaatttgatgttgctgccgtcccccattggcacagcctgttgaaccgttccctttccaaaagacgtatcgcctacaacatcataatggccagcttcctttaatgcgccggcaagaatttctgatgcagaggcacttcctttatccgtaatcacattgacagggtacgcttttttatgggtcaatgttgaaaaataacgttttttatccccattgcgttcagcaatctgaatatacggctgatcctttgtaacgaaatgcttaagaatttcttccacactttgaagatatccgcccgggttgccgcgtacatcaatgacaagtccttttatttcttttttctcaagctccctcagcgcttttgcaaaatcctctgcggtgtgctcagaaaaagtagagatggcaatatatccgacagaatgcccctgtacttttttctctgatgcaaaaaccgtttcgagcggaatctcagctctcttgatccggaatgacagctgcttcttcgttccaggccgctgaatcttcattgaaacgctggaccctttttttcctcttatttttaacacagcgtggtttaaatccttgccggccatcgattctccattgatgctgataatttcatcattaggcttcaacccggctttttccgctggcgatttcttgaatggagaaacaataataattttgccgtcttccattccaacctcagccccgatgccttcaaatgaggaatcaagagaatcagaaaattgcttagctgtctgcttgtccatgtaaacagaataaggatcatttagcgtagacagcattccctggatggctccctcgagcagcttttctctatctactttttctacgtactcattcgatattaactcatacgctttttcgattttgtccatagctttatcccgttcagagtcagcttgtgccgtcgcgggaactgctgcagtctggggcttatccatctcaagcaggttgattcccgcatatacaccgacgcctccgaacagcatgctccctgctgctatcacagccattattttttgattcatcctttactcctcctgtatgccagactgtctttaccaaaacctagagatagtatatgtaaaggatggagatttcatgtaatcatagaagaaaaagaaggcaaatgaaaagccgtcccgaaaacggaacggctttttcactttatactcgcaaaaacttgcggatggaagtcagacttccccatactccaattactgcgccgattgcaatcagcactagcgaaacttggaatacaaatggattataaggaagaagagagacaaatgatccttgaacctttggaacgacccatccgatgacgtattggtaagtgctcagcaccagtgcaatcggaatcacagaaccgaatacgcctagcagcaatccttcaaggaaaaacggccagcggataaaccagtttgtcgcgccgacaagcttcatgatttcaatttcttttcttcttgcgaaaattgtaattttaatggtgttggaaattaagaacatcgccgtaaataccaggccgataattaacgcgattccgatgttgcgggaaacgccgaccactttaaacaaacggctgacctcttcttttccataagtgactttataaacatgatccattttttcgatctttttcgccacgttcggcgtatcatgcggatctgtcgttttgacgacaaacgcatcattaagcgggttttcctgatccttcattgtcagggattttccgctgtcaccaaaactgtcaaccagctggtcaagctctttttctttagatgaaaaagtgacactctgaatgcccttcagttccttaatatcgttctgaagcttgtcctgtgccttctgatctgcagtcagatcaaccagcactttgatttcgacttgtttttctgctttcgtggccatgttattcaaattcagcataatcactaaaaacacgccgactaaaatcagcgtaacggttacagcactaatggatgcaaatgtcatccatgtgtttctcccgagagatttaaaactctcacgcaagtggcgcccgagaattttaatcatatgaaccatactcccctcttgactcatcacgcacaatgataccatcttcgattgcaatgacacgtttcttcatggtgtttacgatttctttattatgtgtcgccatcacgactgttgtcccgcggttattaacttcctccagcgtcttcatgacttcccaggacgtatccggatcaaggtttcctgtcggttcatcagcaatgacaacatcagggttgttcacaattgatctggcaatagatacacgctgctgctccccgcctgaaagctggtcaggaaattgtcgcgctttatgcttcagctgcacgagatcaagcacttcaagcacccgtttcttaataacagacggctgttctccaatcacttcaagggcaaatgccacattttcaaaaacagtaagtttcggaagaagcttgaaatcctgaaagacaacgcctattttgcggcgcacgaaaggaatctctttttctttaattgtcgcgagatctttatgattgattaaaatttgtccttttgtcggtttttcttctctgtaaatcattttaataaaagtagatttacccgctccgctcggcccaacaacatacacaaactcaccgggatgaatggtaacagaaatcccattgagcgcttttacgccgttcggataggctttatatacttccttcatctctatcatgaaatcacctaatcttttatatcattttatctatcacacggtcatactcttcgaatgcattcgacaatttatgatccattcatttgtaaaaagatgaaaaatctgaaagttccctttttcaatacacttcattatacgtcaaatttagacataatactattacagtttcttttcattcatatttaaagaataaatattcatttgggttggaagtttcgtttattacgaaaactgtttttccatttaaatgaatcaaatccactacttgacaatcattgataaataatataaaatttcgtcaaaattacttttttgtatattaatgttaatatatccataaaaatgaacttggtatcactctcaacttgttatctcatatttacataatctaagtagacacgaactaacagaaaaacatcattaatttatttaaggggtgttataattgaagctaatttacaaggacgaatacggtcctctatattctgaaaagtcaaagaattctatccttaaagagcctacttattttgaagttgattccaaagacaacttaaatagaattgttgataaaaaaggacattacacttatcaaaacaataagcttcataagataaaacctaaaaatataggtgcatctggcagtaatagtggataccctctcattatggataaaaaaggacactccttggaatatggtagagaccttcttgaagtatcaatgagaaataaactttatattaggaccacagaaaaagaatattgttatgagtacgataccgaagttgaaccagatactattcaaatttttgatgacaaagtgcttttgaatttaaaattaagacaaatggttgtacttgtatctacttcaggtaaagttttaaatagctttggtcttgatagatacagaggtgaaggacaaaaacaattaaatgttcccatgttctctgtatatatagaagatagaaattctatattaatttcagatgccattaattcaagagtaattgaagtcgacgaaaatggaaatataatttggaaatatggaaaggatggtttattaggttcggatcaaggactcttatggaaaccaacttgcgcaagaagactttccaatgggcatactattattgcagattccaaaaataaccgattagttactatagatcaagataaaaatattgtaaatgagattgggcaaacaaatgtttctaaattgtttctcacatatcctcgctctgttcaaatgcttgataaatataattggctggtgacaaatacacacaagaattctatctttatcatgaatcaaaatcaaaagaaaatcataaaacccataaatgattcttataacaagttaaatttattttggccaagatgtagtataaaaaactcggatgatgaaataatcatagcggacggaaagaataatagaataatgtttattgacgataaaacattacaaataaaaaaagtaattgattactattatgaacaaggtaatagaatgacaattattgatcctcatgatattaaaataaaccctaaaacaaaccttcttctcattaccttatctggaaacaatagggttatagaaatgactagtgatggcgagttaattgagagctatgataatctaaacgaccctcattctgcttattacttttcaaatgggattattattgctaatacggaagacaacaacatagttatttattatttttccggcaaaaaagaaatcattaataattttaaatctactaattcatgctgtgatgcctttaagagacctcgttatgcgctaccttataaaaatggatttctaatattagatacagacaatcaaagaattatatttttaaaaaaagagaataacgaatggattggagaaaatgtgcctatctattttcctgatggacctataatgaattatctttgttttcctcggtgcattacatttaacaatgataatgaactaatcttaaccgatactgaaaattgtaggattttacgccttgtgattgacgacactcttattaaggaggagcattcaaatgaaatataaagttgattcggcacatggtggtgaaggttgggtacctagaaagcaagatcactctacagaactaggtcatttctggaataactgtggcgtaaagggcgaattcggtaccctgtcacatgttttacttagaagtccaggtctagaggtagaacaaaattttaatcctgctgatatcctatggactgagagaatagaaccatcgaaagcaagagaacagcataataatcttattgaagtttatcgctcccaaggggtagaagtagacttaattgatgataaagcagctgaatcttttccaaatattttgtatgtcagagatttgtttacaatgacagatcaaggagcaatcctatccaggatggcatcagaggttagggctggagaagaagtaattatttctaaaaaactatctgaactcggtatacctattttagcctctcttcactcggatatgatattagaaggtccagacatattaatagtcaatcctgatctagtatttataggttatggtataagaacaaattataaagcagctatgtatgtcaaacagatactattaggattgggatattccgaagttatcatcattcaaactacttatggctgcggacacttggatggtgtagtgaatattttaaattctcggtatgctgccattgttccaaaaagagtttcatatgagttgtacataggattaaagaggcatgggttttcaattattgaacttgacgacatgtatgaaatagatcagttgatgtcaattaatttcgttcagctaaacgaagagactcttctgattaataagggtgccaaaaatacagtgtctcaatatagctcatgtggctttgaatgtctagaaatagacattagtgaattaacaaaaggaggcggctcaattcattgtttaacagggattttaaggaggatttaacgagatgggcgtttctatagtaattccaattaaagttaactcaatcgatgaaatatatattgatttcatcaattacatcattgatttttcttccaatgtattaactaaagacgttgaaataataatagccaatggaagttctaaaaatatttatatatttgctaatgaacatcttaaacatttgaaaaatgttatacattttatcccacatcgttcaattagaacaggagacaacgataaactaaacgggatatactctgctttaatgtacactaagcatgataacattttattagttgatgatcactatagagtatcaagtgaaacgcttgcagatatattaaaatactatgaaaaatatgattgttttaagtttatgcctaaactacatcaatacccacattcagctttaattgatacatgtggaatgtttattgttaatgtattagatagtagaaagcaatattgcggccatttagcctttaaaaaaagtttatatagtgaatggggatttatcaatagagattctctatttgatgagtttgctatggaaaaacatttacgaaaaaagggaagcagagtcggatttataaaagatatcgctctggaagccaaacaagaaattccgtttaaaaaatttcttgagcagagagtacgttatgcttatgaaaacattgctactccctatcgctttacctttttcgccatgatcttaccacttttaatactgttaagcctgatagacacgaactatggtctgaattttgcattttttctaacaagctggacctttgtcatatcaatagtaggtcaattcatttatggtaaacaaatcaccccttggtacacttcactatatagtcctatttggttctggttttatccttttactacgtggatagcaatttacaagtaccttaccggaggaatcatgtttggcgggaataatattaggagggcaggatagatgaaaatcactcaaaagattatagggccacaaagtattgtatacttcaaaaaagataaaaatagagaatttgttgaaaaaatttccactgaacgaggagaagatgaattagttgatcaaattcacttttataaaatgttaccaaaagagattaagcctctttttccagccctatatgattatgatattaaaaacaggccgtttcgcatgtcaatggaattatgtgattttccaacattaaaagagattattttatacaatactaagcaaaacaagttgaaggaacacttatataatgttatacaggacatatttgaaaaaatacacaacttaaaacaaacacaggcaacaaaaaattatgtagaacatttgtatatagatcgttgcgtcaatagaataatagaaacaaagaaattaatgaaagaagcacaatggataaacaacgacttttacttagagggttcaattgtatccaacccaattcaaacggtttttgaaattataaataataataaggatttattaatacctgaatatctatgcactgtacatggacagctaggtccttctcacttaatgttaaacattcaaaagaagaatagttacaaactagttgatccaaagggatttcatgaatttcatgatccattgttggatattataaaaataggtaggtccttcctctatgggatggagtggttagaagatgacttgtataatattaaatattcttttaaaaatgaatatcttacaatagaagattttaatttaattaactatgatgaagtatatatgaagaagtcatttaaacctataatggatttagccataaataattacaaaaatgctgccctaagagtatatgccttaatttgctgtgatctaatagcaaatttaccttttgcatatttatcaggtggtgaaaagagagtagtagctttatataatctcatatatgctgctagtttagatttgtctcaattaaatgatgctgtaaataaggagaaacatatatatgaaagtctttcaaaataacagatataatatatttaattacaaggaaagttctatctttatagaagatagacaaccccattctgttcttacaatagcaaatttaaaaaatcaattagttgtggtgagacaaatgcgaaaaggaataaataatgaaaccgtcgaattgcccgggggacaggttgaagataatgaaaaacctatggacgcagcaaaaagagagctagaggaagaaactggactaatagcaaatcaatttattcaaataggtaatatttatcctctccctagtttaattaatcgccaaatcacatatttttatactgaaaatattgttggttataataagactattaaacaggatgaagatgaaaatatacatgtagaatatcacaaatttccaaaagtcgagtataatcttaaaacccaaaagtggagggatcaatttcttgcttatggagtatatatctgcaaattgaaaggaataatataaaaattttagaggttaaaaatggatgtccaatctatattatttgatcttgataacactttgttaaatagacaaaaaacttttgaaaattatttagattcatttatctccaagtatattttctataactccccgaccgaaaagaaagatataaaaaataaaataatagatatggataaaaagggagaaaaagataaaaaggaattgttttcagaattacaacatagattaaagtggagattaaccccttccgttgattatttagttgaagaatataaaacaatattcgcaaaaaacagtatagttatggatggaacttttgaggttctaacattttgcaagaataaaaatttaaaattagggattataactaatggagaatcattttatcagaagattaaactaaataacacaaaccttacatgtttttttgattttatcttaatctcagaggaattcggtaaagctaagcctcatcgctctatctttaaattcgctattgataagatggccattgatccacgaaaatcaattttcattggagacaatcttatttctgatatttatggtgcttctaggtttggattttatactgtttggtataatcactctaatatagtcaaacaaaatcccataactgtaaaacctaataaaattataactagtttaagtgaattgttgaaaataaaagactggtagccgaaaggagaaaaaagtgattattagtgttgattttctaaatcatttacacagtatttataataaaaataacgatctatccgaaaatgttaaaagaatattcaaagaatataaatgcagtaatatttatgaacacagtgtaagggtagcacatatggcaaaaaaattagctgtacggtttcgagccaatgaagaatcagcatatatagcagccttattacatgatattggaggtattgttcctaatggaaaaagaattgaaattgccaatatactaaaaatccctctttttcctgaagagatagagttcccactaattattcatcaaaaaatctctaaggttattgctgaaaaagtttttttaataagtgaccattctattcttaatgcgatagaatgtcatacaactttaaagtcgaaccctagtatgttggataaaattgtatttatatcagacaaaattgaatgggatcaaaagggttctcctccttacataaatagtctaatagaagccttagatgtttcaattgattgtgcttcaaatgtctatattaagtttcttatggaaaataaaaataatctaaaggttattcacccttggcttagtgactcttataactattttaaaaaataaccctcaactcaatactatatataatattatgtatttaaatccatcaaagttgtgtaaatattggcaagattctcttaagatagccttgtattttttgtttaacactcttagacctaggattaataactgaaatattaatggtctaagagtgttgattatattgaacgattaattaacatgttttatgtcggaaacaaggcattcaatttacactattatctttatttaccttattaaactaatatatattctattcccccccctgattcacatccaatcgaactaagtcttggttgaatgctttaattttattaattctttttataatgaataactataaacaatattattagtgtagaagattaaataatttcatttttattacaatatgaattaataattgtttttcaaaaaattccatgttataatttggtaaaccactgaaatttaaggagggttttatgagtaaagtatttgataaagaagaaatccttaaattgattccgtgttctgacaaaattgactatatatacttagcggggtcaataatggaaggtttcggaaatgatgcttcagatattgatgtttttgttataagtgaaaatccagatagactagcttatgaacctactaattttacaagagaagtaaacatacaagtaggagaatcattcataaaaaatattgttatagacagtattagatatgattttgagtactatcgttcttctagttttacttctttaatagaaaagttgaataatttgaattttaatacagaaaattatattccaaggtttacagcagatgaaatagatcttttacatagattaaaatttgctgagccgcttctgaataaaagtgcttttaatactattctaaacaatataaattttgaaaatttaaataattatttagtaataactaatattgagtcatatgatggacatttagaagacttacagggagctctttcttgttctgattttggtacttcatttgtgcttttaaaattattattaaaatattctcttaatgcttatttagcgaaatatggagagacaaatccaggagaaaaatggttatttagaaaattaagtagatacgccgaaaaacatggtgatcaacatttacttgataagtatcttaatttattatgttatccttttgagaaagataatatcaaacattatgctcaaaaaactattaattttactcaaccattaattatcaaagctcaaaaataaaaacggagggaagtaatcacatgatttatcaaaaaaatatgtttgtgagattccgtatcatcgatactaaaccttatcttattcttaatgacaatgcatttatcttagacgatgtaggcgttaatatttgggaatcaattgatagcaaaaaaaatattgaagaaataataaataaaatctcaaatgtttactcagtagagtctaataaaataactaaagatattaagaattatttaaaagatcttgaaaaaaacggattaattgaagtgtgtaaagaaatctcataggtagttaataatgtctggaatgggctcctttagtggaggtgagattaatgtataaaaagcctgtattaattaaggtgaagcttcctgttgcgttagagtttgtttaattactacttaactgattgacctatcttttatgaattgaggtgagattaatgtataaaaagcctgtattaattaaggtgaagcttcctgttgcgttagagtttgtttaaatctaaaaccagactaaaataattgatcaaaaaatcaaaggagcccatccctaacattattattaaatcaacaactactcataaaattttaggagtaaggtatacattatgctattagaagaagttttcacgtatatagttctttttgttatagttaaaacatgtatgtttcttataaggaaaattaggggtaatcttttatttgatgtgctaaggaatttattatttttcgtcccttttattttaccagcactttatttaggcttacctaatttaatttttcaaggttcgattaattattatttattatccattttttcatcatttttagctttaagcattaagtataaagaatttaaaccttacttcaataaaaatttttaccaaatcctcccgaaaatttcttttaaagactttttaatattggaaatatctttgataggaagcgctatttttgaagagtttttttacaggagttttgctcctcactcctcttttattgtaggcatggcattgtcaggaatcctatttagtattgctcattatatacagaactatacaagaagttttttcgatttaaagacatatattttattgtttttattaggaatggtttggtattggagttataaaaatactgggactttaattccagcaattttaggtcatttagtatataaccttcctagtatgattttcacctattttcactttaaatcatcaagatttcggtgaggaaaaagggggttataatagtgagtagaatcataattgcaactataaaaagaaattatatagtttcaaagagagtttttccttggtcttttattatagccagagttcttatgggaatctatgtttctgtatttgctttttttacttttaaatatatgtttgatggaaaaacagaaagtcattttttaaagtatagtaatgggatagactatataagctttgtagttctaggagccggtctttatacatattctatatctgtaataatgaatgtaggtagatctcttatgttagaaaatatagaaggtactttagaaagtatacttgtctcaccgtgttcacgtttagggtactttttaggagttttttttgaacaaataggtagatcaagtttagagtttctaatagttatatttttcagtttatatttaggtgccaatattgaaattgagaacactattccacttttaatagtaatcattattactacaatatctcttttcagtattggtatatttatagctactctaatgttatttctacgcgacacctatataacacagaatactttatttatagttatgggattagttagtggagtatcttttccgagggagtacttacctaatatcctctactatttatcctatttgtccccattatcttatgcactttctttattccgaggtgttatgacaggacaaaacattttaaattacacaaaggaaatcttggacatatttgtcttgagcctagcttattgtctttttggtttactttggcttaaatgtctggaaaaaaaaatattagaaaatacatttaactaagggtgatagtaaatgctaattgccaaggatattagtaaaacttatatattgaatgagagaaaaggtttttttataaaaaaaaaaacagagattaatgccttgaaaaagctgaacttaacaattaagccgggtagtattgtagggttattaggagttaatggcgcgggaaaaagcacaactattaaaatattatcgaccattctagcgccaactactggctccttgaaagttaatgaagtcgatgcattaaaatatcctgtagaagcaaaaaaattgttaaacgtaataactggtggtgaaagaaatttatattggaggttaactgctagagaaaacctcgaatactttggagcattatatggactatctaaaaaagaacttaaagactatataccatcatcacttagtttggttggattaaaagactcaaatataccagtcgagagatattcaaaagggatgaaacaaagattacaaattgctagggggctagtaaataatcctaaatatttatttttagatgaacctacattaggcttagacataaatattgcaaaagatttaaggcaatacataaaaaaattagctcaccaaaaaaacaaggggatattattaactacccactatttatctgaagttgaggagctatgcgattgggtttatataattgacaaaggaaatttgctcacagaaggcactccttcagatattgtatcaaaaataataccagaaattcaattgaaaatagaattgtcaaatctaagttgtgaattaaaaaaagaattattgtactatgttggtgcaatagatgctaaaatacattttttcaaagatcatactaattactcgattttattatcatcgaaagacgatttaacttctgatttggttaatattataacaaaatacagaacttccattctaagttttaaaaccgaagaacctaatcttgaggatgcattattaacattaacaagtaaacaaggtgattcaatttatgaattggttaaaggtaattaaagctgaaatatataaacaacataagaattcatttcattcaacaaaagcttatttttcattattaatatggccaatattaaacttaattaatgcctacttatgttacaagccttttaatttaaacgatttaaaattatatagaattaatacatctgacgaattaatatcctttttattaataggttttttcacttatatttcttttaagtcgttaatgcaaagtgctttacaaatgagttatgaaagatcaaatggaactttggaaacaatattcttatccccagcaaatcgtttatcattaatatacggaagaagcttaggatttatattcggtaatatatggatgttttttgcgtttactttttttataatgtgttatatcggatcaatacctatatataatttagtctattttccaatatgtttcattctaatcgtcatttcagcaactttatggggaggcttattaaatactatctttcttttttctcgagatgcttcgatattgtttatgattattgatgatcctatgatgttattttcaggtgtgagaattcctctaactcttttcccaatatgggcacaagtaatttcttttatatttcctctcactcatgttttagctgtagtcagagacttaatgttatttggagatatctcgttatcctcatggaatcatttattatacttattatcagaattattatttatgtatatgataactttatttttgctatcaaaagctgaaaaacatgcccgtattaatggagaattaaccttttattgaataggttaaaaaaaagtaaaaaatacttaattaaagtattttttactaaatttatttcttatagtttattttttaaactacatgttttttatacttttatttagcttgattacattgttaactaaggagaaatacctttgtctaaaggtgtttctttccttagttaacaaatcaatctccaatcatcttactttttttctgacagccatttggcaataacggcggcttccttatcatctacaagccccttcggcatattgccgcggccgtttttaataatgctttcaattttgtcttcgtcgtatttgcctccgacctcttgaagattaggccctgacacaccttctaaatccttgccgtggcagcctacgcagctttgctgatataattcttccccttcagatgcagaggcttcagtcttgctgcctgtatctgtcttctcttcttttgcatcatttgaaccgcaggcagccaaaagaactgaaagcgtaaatacaagcattagtatcgataactttgatttcatgttgagaagcacaactcctttacgatctcttccatattataacctcgtttaagcacgtttgaaaccctcgcccagcacctcacttgcatccgccacaatcacaaaagctgactcatcaatctgtttgacgatttgtttcaatttggtgaattcagtttgcccaaccacgcacattaaaatcggacggtcatcgtcagtatatccgccgactgcagagatttttgtcacgcctctgtcaatcttctgtaagacagcctccttgacagcctgctcctgctttgtaatgatgagcgccatttttgaacgattaaagccgacttgcacaacatcaatggttttgctggacacatagacgccaagcatggcatataagccttgctcaatattaaatacaatcatagccgtaacaacgatcattccgtcaatgatggcgagacacttccccaatgacagaccggagtacttatgaatgatctgtgcagccaaggctgttcctcccgtcgatcctttccctaagtacacaataccaattccgatacctatcccgacaccgccaaaaatcgccgccaggagttcatgatgagtggcgggctgaatatcccttgtcagaaacactactagcggcaaaaacacagaacctgcaagcgtctttagtccaaatttcccgccgagcaaaatgacgccagcaataaataaagggatattaataatccactgtacatacgctgcttcaaaaccatatgattgtaaaatcgtactgatcccgctgacaccgccggcggcaatcttgttcggaagcaaaaatacattaaaggacacggccgtaatcgctgctcctatcaatatgtatacataatcccgcaaaatccacaatgttttattccgtacgtccatcatatatcctccgtttcttccaatgctctccgatagcattttaatccttccctgattagatgtaaataacacccaaatacagtggtaatatgctaaagcagcagtgaaatcaaggatataaggaattaaaaaaacacacccgttgcatcaggtgtgtttttcagcttatgaaagcttagaacgcaggtaggcatcaataaacgtatcaatgtcaccatccattacagcttgaacgttccccatttctgtattggtccgatgatcttttaccatggaatacggatggaatacataagaacggatttggctgccccagccgatttctttttgttcaccgcgaatttcatccagctctgcctgctgctcttcaattctgcgctgatacagcttggccttcagcattttcatggctctttcacggtttttaatttgtgagcgctccgtttggcatgtcacaactacgttcgtcggcaagtgagtaatccgaacggctgaatccgtcgtattgacgtgctgtccgcccgcgccgcttgcacggtacgtgtcaactttaatatcctccgtacgaatatcaatatcaatttcatcgttaaattcaggcatgacttcacatgaaacgaaagatgtgtggcggcggcctgatgaatcaaatggtgagatccgcacaagacgatggacacctttttctgctttgagatacccgtaagcgttgtgtcctttgatgagcaatgtcactgacttgattccagcctcgtcacctggaaggtaatcgagtgtttctactttaaagccgcggcgctctccccatcttgtatacattctaagaagcatagagccccagtcctgtgactctgtaccgccagcaccagggtgcagttctaaaatcgcgttatttttatcatacggctcgctgagaagaagctgaagctcaaactcattgaactcttttgttaatgattttagttctttttcaagctcaagctggagatcagtgtccggctcttctttcaaaagatcatgagtcatttgtaattcttcgtgggattcattcaattttttatacgaattgacataatcctttaaaccgtttgcttcatttataaccgtttgagctttttgctgatcattccagaattccggatcagccatttgttcatctagctcagcaatgcgggcctcctttgattcgaggtcaaagagaccccctaaagtccgctaaacgagaagccatattttcgagctctgctctgatttctgataattccatttcattcacctcattaaaagatccgcaggcgcctgcacgcgccgcggtcagtaaacttgccggggcgaactattcagtacggccgcagcaatttttatattttttcccgcttccgcagtggcatggggcatttcgtccgatatcaaccactttgcgaaccggtgctttctttgcttttttgttatcgtcgccttcttgcggctgatgagctgttgtttggccttgtacaacctcttcacgctccagattgttttcaatctcagctttcatcacaaattttgcgacttcgtcctcaattgattcaatcatatgctcaaacatcgcaaagccttccatttgatactcacgaagcgggttcgtctgcgcgtaagcacgaaggtgaatcccttggcggagctgatccatcgcatcaatatgatccatccatttagaatcaacggcacgaagaacgataactttttcgaattcgcgcatttgctctttgccgaattgctcttccttctcattatattttgtgatgatgcgatccataatgagctcaagcatttcatccggttctttcccgaagatatcgctcttctcaagcgcaccttcatcaagataagttgtgttgataagatcaactagaccgtcaagcttccactcctcaggaagctcttctcttggcgtatagactgcaattgcgcgttcgagagaagacttgatcatattttcaacgatttcacgcaggttttcagagtcaatgacttcaaagcgctgcttataaatgacctcacgctgctggcggagaacatcatcatattgcagaagctgtttacgcgaatcgaagttattgccttcgacacgtttttgtgacgattcaaccgcgcgagataccattttgctttggattggagtagagtcgtccatgccgaagcggtccagcatcgccattgtccgctcagctccgaatctgcgcatcaattcatcttccatagaaagataaaattgagtaatccccgggtctccctgacgtccggaacgacctcgaagctgattgtcaatccggcgtgattcatgtcgttctgttccgacaacagcgagcccgccaagctcttttacaccttcgccaagcttaatgtccgttccgcgccccgccatgttagtcgcaatcgtaactgcgcctttttggccggcctcttcaatgatctgcgcttcacgttcatggtttttggcatttaacacttgatgcggaattcctttgtttttaagcagcttagaaatcaattcagatgtttcaacggcaaccgtaccgacgagaacaggctgtcccgtcatgtaacgctgtgcgacatcctccgcaactgccttaaactttccttccatcgtgcggtaaattaaatccggtcggtcatcacggacaacaggcctgttggtagggatcgtgacaacctgcatgttgtagatgttgcggaattcttcttcctctgtcttagctgtacccgtcataccggcaagtttttcgtacatccggaagtagttttggaatgtaatcgtcgccaaggtcatgctttcgttttgaatctcaagcccttccttcgcttcaatcgcttggtgaagcccctcactgtagcggcggcctttcatcagacgtcccgtgaaggaatcaacaataacaacctgtccgtcttccactacatagtcaacgtccttttgcatcgcaacgtgagcttttaaggcctggttgatatggtggttgagcgcgacatgcttcacatcaaagaggttatcgatgccgaatgctttttccgccttcgtcattccttcttcagtaagctgtacagcttttgttttgatatcgtacgtgtaatccttctccgcttttaacgtgcggacaaaagcatttgcctgtacgtacagcttagtggattttgcagcttgtccagaaatgataagcggtgttcttgcttcatcaattaaaatagagtcaacttcatctattaccgcaaaatgaagcgggcgctgaaccatctgctctttataaagaaccatattgtcacgcaaatagtcgaagccaagctcgttgtttgtggagtaagtaatatcagcggcataagcttcccgtttttcgtcttttgacattgagtttaaattcaaaccgacagtcaaaccgagaaactcgaaaattttccccatttgctcagcgtcacggcttgccaagtattcgttgacagtcacgacgtgtacgcctttaccggttaacgcatttaaataaacaggcagggtagacgttaatgttttcccttcccctgttttcatttccgctatatttccgtcatgaagcgccacgccccccatgagctggactttaaacggaaacatgcctgttacgcggcgtgaagcttctcgaacaacagcgaaagcttcaacaagaagatcatccgttgtcgcccctttttcaagacgctctttaaattcaattgttttatgtttcaacgcgtcgtcagagagattttcatagtctccgcgaatcgcatcaatatcgttagcaattttttcgtatctattcagcgtacgttttgttggatcaaacattttatttaaaattccaagcatttataacgctcctctatcttcacatgcctattttagaggcatgtataaataatttactagtccatgtatacctctcattatcatatcataccttttgttatttccaaagaatttgcaaataagaaaaacaaaaaccttccgcggacatcacggaaggcttctcttcattattcagtcggttcaattaagccatatttcccgtcatttctgcggtacacgacatttgtaaggtttgtttccgcatttgtgaaaacaaagaaattatggccgagcatattcatttgcaagatcgcttcttcactatccatcggctttaaattaaagcgtttctgacggacgatgtccaagctctcctcctcttctatgtcatcctgaaccgcaatatctgtatcagagccaagaccgtttgccaataaatattttggagagccctgctcacggaatttacggtttactttcgttttatgcttacggatttgacgttccagtttgtttgttgcgagatcaattgcgttgtacatatcctcgttatgcacctcggaccgaagcgccagatctgtcatcggaatcgtaacctcaaccttagactccttgtcattgtaaaacttcaagttgacgttcacatcagcatccacgctatggtcaaaatagcgctccagcttgccgatcttcctctcgacatgatcctttaacgcgggtgtcacttcaatattttctcctctgatgttatagttcatcaaagaacgcctcccttttattaaggatatgtatctatttctcttttaccctttacaattcctgctgaaacataaatcttttgtgaaaattcagtgaactttgtcgaattttgtttgtatttgctctgttattggcggttcggaggtatatgtatatgctgattgaacgaaacaaatacctcacacacgcctaattgattaaaaagggttccatacattgatgaatagacagcatccattttctataatgaatcagaaaatgttcctttaaatactcacagaactcatgagagggaaaagagaaagagaccaattgatcaaactccgcaaaaatttggtcaaatgctttcacacaaatttcagcacaccgcgaatccataatgaagagaagtgttgaatgtgttgaatccaaataaaaaaaggcttggatcagatcttggtagatccgatccccttctgtttttgataaattctcttcagcctctatcaaataacacaacccctcttcgatggtaaaaagaagatgataataagctgataaaagcgtataatcttcaatgctcttcaaggcactcacctatttacgcttgtcataatatgtgccgtcaatcgtaatgttgttataagggtttaaatacgtcgtatgcatcacacgttttcttttcatctgctgaagttctgttgcgattgactgcttcagtctttccatttccttcacaatcagctgatcccatgtcaaaataagtttcatctgctttctctcttcttctgaaagcggcagagatatctcctgaatcagttcagaccgtgtagccacaaagtcttcaatttgctttaaaagttcatcgctttccggcgtattttgtatgtgtgacagcatactcttcgtctcagtgtatagttgatctatattattcatgcgatcccgcctgatccgtgccggtccttccgttcactttgaattgcttgtttccaagcatcgcgaaaatctgttacataaccttcaacctcagccagcatgcccgtatcatttttgatatttgcctgtaccaatctgcgatacatataatcgtacatcgcacccatagaagcggaaagctctatgttacggttaagtgtaaaatttaattcctgaataatattttgcgctttaatcagattttcatttttacgttccatatcatcattctcaatggcctgagcggcaagtcttataaatttcaaacagccattatacagcataagcgtcagctcaccgggtgtagccgtattcactgaattttgctgataggctgtataaggattttggatcgccatgtgtcatcctccaaattacatttattgtgctagaagctgtgataaataggacgattgttcgttcattttttgaatcgcagaatccattgcactgaattttgaataatagcggttttctattgtggtcaaccggtcctgcattttggtaatatcagtgctgatcgtatttaaatttttaccgattgaataatcattggttcccattgtcgagttgccggcttttgcttcaatgctcttcaccgtacttttcagggtgtcaccgatgcgtttcataatccctttatcactataggcgctgctgttcgatccacttgtaaataaagcggcgacactttgcggatcttcttgtattttagctttcagtttgtcttcattaatttctagatgtcctcgcatttggtaagcaccagacgttgtgatgccaaattcagttaattgataggtttttccatccgcactaacttgagaataaaaatcagtccgcatttgattcgtaccagtgcttatgctggtatcatttttcagcaaaccgctttttgccttctcttcccagagttctatctctttatcggacatggcttctttttgttcactcgtcagcggcgcatagtctctgtatttttcttctttcaacttttcattcaggctgtcaaccagttcattgtatttattcacaaactctttaatttggttgtaaatcccgtcaacatcagtagatacagatgtggtaacagggcctgtggctgcagttgtatttttgatcgaataagtaacgccattcactgtgaagttgtttgacagcttctccatttcaaagccgttgatggtgacttttgcattcgttccttctttgtaagcagtaatcttattatcagtgtccaaagaaaaacctagctggccagacataaaatctgctgtagcagagtctgctgcttgtatactgcctcctgcacctgttgctttagaagaaaacgcaatggtttccacatactctgtaccattccaaattttatctttaaaagctgatactcctagatctgagctgttaagtttagaaatcacattatcaatcgtatcagcgctcgtcacactaatgttcactgtttttgcggctgtctcaccaggcgcaacaacgttaaatgccaaattataatcgccctgtgtgtatcctgtataattgtttgccttatatgtcgcagcagttgccaaacttgctacttcaatagtagatgaagagtttgctgcacttgcagttcctgtagcagttaacacagattcgtttgagcttgatacggttttactctgaaacgtactcggatatgtcagcttattattagacatataatcttggaattcttttattttcgagtttacttcacgatagctatcacgctgccattcaagagtctgctttttttgtgttagcttattaagcggtgctctttctgtctgcatcagctttgatacaatatcatctatatccattcctgacgccagacctgttattctcgtgaccatttcaaaccactcctaatctactttttttcatctacaaataacccaagaaattcagtcatagctgcataaaaatctagccaccgccttggcggaatttcacggatcacttcatttgtagagtcctctattacttttacatagtattcatttaacttctcatggagctcaaacttcagatgaacttgcgaaggttccaaaaacttgttcattccctctaccatttcagcaaggtcggtatatgaaacttgatgaacaggaacctcactctcatgatctttctgattatgtatttgagtatcatagcgatcccaaacaggttgtaacgtagtgagcctttcaatgttcaattgatcatcccctatgccccaatctatcgtttatatcgactaaatcgagataacattacacatatttttggaaaaaatctcatccgttttagatttcttagtttggaaatacgtttataaaaagtaagtggagaatccggttattatatcatgatttaataacagcaagtggaatgattcggagttagaaatataaataaaagaccttggcaacgccaaggtcctctctaaaattaacgtaacaattgaagcacgttttgcggctgttggttcgcttgagcaagcattgcttgagaagcttgagaaagaatgttgttctttgtgaactcgctcatttctttcgccatgtcaacgtcacggatacgagactcagcagctgttaagttttcagaagaagcactaaggttgttaattgtgtgctctaagcggttttgtaccgcaccaagttttgaacgttggcttgaaacgctagtaattgcagtatcgattttcgcgatctcagtgtcaaaactaaaagtagctgatgaaacatcgatcccttttactcctaaagttgttgcatccatgttgccaattgtaacattaatgttttgggtagcatttgcaccaatttggaatgtaaatcctgctgttacactaccgtctaaaagtttttttccgttaaattcagtacgttgagagataccatcgatctcttcagttaaagcatccatttcatctttaattgcagttaaatcttcaggttgctgtgtacctgtgttaccagcttgaacagtaagttcacgcatacgttgaaggatggcatgagtttcagtcaatgcaccctcagctgtttggataagagagattccgtcttgagagtttttagaagccatatcaagacctctgatttgtcctctcattttttcagagatcgcaagaccagctgcgtcatctcccgcacggttgatacgaagacctgaagaaagtttctccatgttcttttgtgctgcaccgttgtttgaagacaaacggttcagtgtgttaagcgctgcgatattgtggttaattctcatttttatttcctccctgaatatgttgtttaggcacgtccttgtgcctcaattttgtaatcggcgagccatttgtgccctctcccggctacatcattaatatcggattgtctctgattttgttaatacaaaaataaaaaaatcctcactttttttgtgaggataatgcggagatcacatcgctggataacgacgccgcacggttattttcttcctgaatggttaaataaatctctttccgatgaatatcaatatgctttggggcttcaattccaagcttcacttgatccccctcaaccgcaatcacttttacttcaatatcagcacctatttgaatcgcttcgcttattttccgcgataaaactagcatgattctcctccaatcggatgctttgtcgtatatgaggagtcgtgtaaaacgacttgcttagccatcatgttcttgcgattcacaataatgggagccaataaattcgcagtagacttttcaaatggctctgccatagtcaatattgtcatgacttctacgtcttgaatattatcgatatccaaaagttcagcagttgattcatcaagatcaaattcataattcttaaaaaagataaacggacttacgacgataaacgcaagattttctgaagtgacggactgcagtgccacgaatggagagtcttctgaaagcggaagtatgacaaattgtttttcttctaaaaagcctggaatcccgctttcaaaaagaatgatttgttcttcttttatgttcatttggccatggtacttcgtatgaatgatcattgttcacgatccttttctttttacttttcgggtgattctttcgggtattctacatctatatttaaatcagggtattggagcatgtcaaccttaacatttcctggcgtatattcaacaattggcttatgcggctcagcctgaataacaggctttcgcggcgtaatctgaacatcaagctgtgacggagtatattgtattttcaccctagatagagaaggagcataattttcgcctaattgaatttggtgcatttcagagttcctccttgcttgtgaagcgattgggttccccttattttcaatcctcataagctcgtcgccttcttctgcagtacgcgctattccctccattacatcctcatgcccttgttgtgcggcttcttcaattctcttgaaaacatgctttctgtctaattcttcccatgcttgtgtctggtcaatcgtgagttttccaggtgtcaccgatatttccatttccgcactcggctgttcgatctctagatcagcttgaggctgctccatttttaagctggcaggcgtcgttgttaaaccaatttttccttgaacactatgcataatcaatctgggaatctgcatcactctacctcctgaactataaaaaaagcgaactcctgagagccgcttactttaaaaagtcaattaatgtaggctgaacaatttgcgcattaacggccagagtagccctgtgcacactttgctgcgcaataaattcagttattacttcttccagttctacatcttcattgtctgataacactttggtagctgtttcttcttgcgctgacagtcttgtattaaccaattcaagacgattatatctcgctccaagatcagatcgttcagcactcatgccgtcagaaaaatgatcaatatcatctaaaacactgtccatgccatctagcgaaccagaatttagtgctttctcaaaagaatcaagcatttcaaatacattctgcccgctttcagaagtgcctccaaaagctgactttggatctgaattcactttcaatgacatattatttgatatattgactacgacatcagctgtatcagaaattgtataagttccgtctccgttatctgtaaccggaggcttatctgaatttgtgccattaaagatatatctgccgttcacttgtgtattcgcaatatttaaaagctgttcctttaactgctttacctctacgccaatcgcttgccgctccgactcgccgtttgtatcattttgagcttcaaccgctaattctctgacctttgacaagatgtcaattccttctgtaatgtttgtttctgtgttttcgagccaggtaaaggcttgagaagcattgcttttgtactgctgcacttgagacagttgcgtattatactttaagcttttcattgctactacaggatcgtcggaagcttttgagatttttttccctgaagaaatctgcgactggagtttatccagcttcgagtagctcgaaccgatatatctcagtgagttttgctgtatcatgccttgtgttactctcatgtgactctacctaccttcctccaacacccatgccgttgatcactttatcaagtaattcgtcttgtaaagtcaccattcttgcagctgcattgtatgcatgttggaattgaatcatattcgtcatttcttcgtctaaagaaactgcgctcatttgctgacggtttatgtcagcatcatttagctgtgtttctgtattagacgccagtcgattagcctcttgagcttcgatccctagctcgccaatcagacccgcataataatctaaaacactagtttctttaccgttaatggttattttaccggttaaaacatttgctaattttgtagcatttgcgttatcgttggctgcaccagtcagtgagaaagcaatgtttgcgccttttgaatctattatgctgtcagccactttgatcttgcccgccgcgcccttggcaggttcagtttcaccgccagtaaaatcaaaaaagtctccgccttgttcaccgctcttggtcacaccatttctgtgcacttcattgaaagctttcgcgaattcaagcgccatattgtcaagatcagaaagcatttccgggtatacgcccttttcttggccgtctgctgttatatacccgtaagactctataaatcctaaaagggatcccttgctgctaaaggactccgcctgcacagctgtatccccgattgaaatacttgatactaacccagtttcattatcatagttggctgcaagttctgaaacctcgtaatttttaccgtccaaaacagttcctagcgactgtttatttttatcaaggatttcaattgatacagttccttcagcagatgcaagtgcattcccgcctgatttgttgtagttgactttgatatcaaccattgaggataatttatcgatcagcaaatctcgctggtcatataaaccattcggaagaagcccgaccggctctacttgtgcaatttgcttatttaaactgtttaattgagaaagcagagaattgacatccaacacagttgtatttagctctgcttttaaattcgattggacatttgtaagtgattcagaaatataattaaacgtttcagctacagcttgtccttttcgagcaacaacagaacgtgcactttcttcatttgtattattcgataattcctgcagagaattccaaaacgaattgagcacactgttcaagccgctgtcatccgtttcatttaaaacgccttccatttgggacagcgctttggccttcgtgtcatagtatccggcactgttgttttgaagacggtattggtagtcaagaaagatatctcttattctctcaactgattttccttgaacgcccgtacccatttgtcccgctgttttttctgcgtttttagatacagcagggaaatagtcagttgcttccaatgagacccgctgtcttgtataaccatcagtattggcatttgccacgttatttgcagtcgtgcttaacgctgcctgctgagcgcttaacgcccgccttgcagtttcaagccccataaaggtagatgtcattttctgaattcctttctgctaagcttttgaatcaaacagtttcattttgctgcttttcggcagctcagctttaattgatttgctgtaattgaagttattttccttaggaaccagcatatcgtacgaaatagagatgaattgcagcgcgtctcttgtcagctgcctattcatctcatttacttttttcagacgtccgagaacttgagaaagagattcgtatagttgttccagctcttccttttcactgcctgaggttttggtgatacatgcggaaatagtattattttcgctatatccgagaaaggccgaagttgttttgatccggtcatcttctgtctgcgtgattgcttgaatatatttttgctcttttgtcaaaatgttagaaagctcttttgttttgccggctttgagcgcttccgtcttttcttcagacagcgtgagcaggtgctcatgcagaacgcaaagtcgcttcaattgttcaataattgccttcgctgacatgggctttctccttttttattgctttttataaaaattaatcatatttttcgcgatatgatttgcgtctactttgtatgacccgttttcaatttgcgctttaagctgcgcaattttttcctgtcgtgaaccagtgactgcgtcggatgcatgttgcatttctttagcctgtgatgaaatttcaattttatcttgaggctgtgcagcagttttttgcaccgcttgcttatcataatttttttgatatggattaacggattgtgttccaaattgattgattttcataggattcctctcgctttccgttgcagtctttaaacaatcttaacccttttatcgactgcgttttcagttagtttagggaatcagctgtttttggtattataggcatagtatgtgtcttttttactattttctttctcgattttcagagcatcctcgtggttcaaatgatccatttgatccttaatatcggactggcaagccttgcagaatttgccttctctaatcgatgtcccgcacctttcacaagggtatgccaaattaggaagatgagtgatctgaattcgcttctgcctgatgaatttcaatatcagctcttcttccacacctgtttcctcagttatccggctcaaagttgattgccggttttcctgttttcttaaaaatttatagacagtctcaaatgatttttcttcttccttaatacacgcctgacatacggtttgcagctttgtttttaaaaataaagcattgcatttcggacaattagccagttctcccatcttttttctccttattagataatatgcctgtgtcaatttctagtgattatatcggcataaaaacagaatcatttagcttctgatcaaggtaaaagatgacactgaagcggcttttcctttttctaataagcagcgggctgcgaagtgcaaggtggcgcctgttgtataaagatcgtctattaaaatgatattcatacctgctgctgaattattttttgtatcaaaaatgcgctctgacagcaggcgttctgttttctttttctttgactgcttctcattattcaggcgaatgaggggatggtgggaaggccgatctaaacattctgccaagagctgtgcctggttaaaaccgcgctcttcttcccgttccttgctcagcggaataggtacaagaacaaaatgcttatcggggtaagccttagaaaaggttgaagaaaaatcacttttaaatgcatttatgatttctgcatctcctctaaatttaaaacgggagagcgcttctttcatcatatcattatatgtgtaaactgaacggttttgacgcaatagcaaactgtctctgatccttgttctccacacctcgcaatccctgcatacggcatgaacagattgaggtctgccgcacagggggcagatatgtcctgtgattttctttaatttgcttctgcaagaataacaaaccttttcatcaggctttagtaaaaaaagggctctccatgtaacatcttgagaaaattgcgaatcacataataaacagatcagtttatgaatgcctcctcctgcttcgtttgacataaatcgcttggactctctgaaactactgcagcagattcagccaaaatgacaagcattgctgtgtttttttgtttatctaccagctcagctttcgtatatgcgatctttttaagatcagtaacgtaggatggactcactttgtttaaagaaagtgccaatacatcgttttggcatacttggcaagtacaggccatatgaagctggtccatatatcggtcgagcagttctttcattacgatttcttttgaattgacaagcatttttacagctcctcatcatcggttatatgagtatactgtaccacgttttcaaataatggctagtctgtacattcaacttttgctgccaattcattcatttcttttatatgctttcttgcatcgagcatactctttgttttgccgaagtgaaagtaaatgacatcgccgtccgcatattctttatgccggccggttcttcctgcaatttgaacaagtgcgctttccgtaaagatagacgattccgctcctagtacacccgtttgcaccttggggactgtgacgcctctttccagtattgttgttgtgattaatagatcgagctgaccatctctgaattgctgcactttctcctttctatgcttgtcttccgcgtgcacagatgcggttcggcaatgaacacctttaaagcacgcagcagccttttccagaatagaaacggaaggaacgaataaaaaaacaggcctcccttcttttacatgaaactctatccatcttttcaccgctggcggaattttatttcggtttaatttcttcttccagtttccacaccatacaaagcgcggttcgggtaaaggtttccggtggtgtcttgcggggatgcgaactgaatgtaactgtccgttcagtgcttttctttttaattctttaggaggtgttgcacttaaataaacgagggtgctgtttttctttcttgctttttgaacagcgaattgaagggtttgatcagcagaatatggaaaagcgtcaacttcatcaatgatcataacatcgattgcatctttatatcgcaaaagctgatgcgtagtggaaatcataagcggagatagccgccctttgtcatcgcttcctccgtaaagcgctgaaatgtcagcaccctgaaaggcagccttgagtcttggagcaagctctaatacaacatcggtgcgaggtgttgcaatacatacacgcagtccttgatttaacgctgattctataccaggaaacagcatttctgttttgccagcgccgcaaaccgcccagatgaggagctcttctttttttgatattgcttcaattaaaacattggcggctttttgctgtccgcttgaaagcttgccatcccatgtcagcttaatagacttccagtttgattcattttcctctttccatgaatataaaggaacctcctcactcactctgcccatcatgacacaggaacggcaatacagcttattctttccagatgagtgataaaaagaaaaataccgctgatcagtttgtccgcacctattacatctatatctccgtttatttatggatatagaattttcagcagtgatatatccattcttgatatgccattcaatcatctcatcggaaaatgagagctcagtcctgagcaaatgacggcttcgaagcgtctgctgcaattcttttgaaaaggaactgtttttttcaactggcacattcacatagcacgcctcctttcgaaacagtatgcctgaatgaatattttctgtccaactattaaaataagaatataaaaaaatctccgctctaaaaacggagatttggccttatttaaaacaccagcaaattcctaacgcaccttcacccaaatgagtgccgattaccgcgccaaaatagctgttataaaattcaacatgaggatattttgcagaaagctcttcaatgattttcgctgcttcttcctctcgattagcgtggataacagcagctcgcataggcaaccctttactcgcatcttcgtctaaaagctcataaattcgcgaaattgcttttttacgtgtgcgaatcttctcaaaaggcacaattaccttattgtcaaaatgaaggataggctttacctttagaagactaccaatgaaggcttgggcgctgcttaatcgcccgccgcgctgaagatgggctaagtcatctaccataaaataagctcgaactgtttttttcatttcttccagttcttttataatatcttccggcgatgatgctccgtttttgattaattcagcagctttaagggcataaaagccttgagccaagcagctgatctctgagtcaaatggatacacatcaatattgtcgaccatcgaatcagccgctgctgcactgctgaatgttccgctgatcccgctggaaagatggatactgataaccgcatcataagacttgccaagctcttcatacaacgcaaccagctcgccgattggcggctgagaagtcgtcgggagctcattatgttttttcacttcttcataaaagcttttccagtccaactcaatttcttcacggtaagtctcctccctaaaaacaacctggagagggatcatatgtatctgatgttgttcacgcatttctttcggaatatatgccgtgctgtctgttacgactgcaatattcatagcttcgatacctgccttattgctttataactctattgtaagggaaacggcagcctaaaaaaagacctgcctagtaaaaggcaagtctcctattatactatctcatttctacccagccatttttaatggcgaccacaacggcttgcgtccggtcgtttacattcattttttgtaaaatattgctgacatggtttttaacggttttctcactgataaacaatgattcaccaataccgcggttgctttttccgtctgcaagcatctgcagcacttcacattcccgcctagttaaaatatgtaatggtctgcggatttcagggtaaacctcatgttgagggtgtgcagaaactccgcttgttgcaaggcggcggaattcgttaacgaggttgtgagtaaccttcggatggaggtaagatccgccctcagccactactttaaccgcttcaattaatgtatcagcatccatctctttcagcagataacctcttgcacctgttttcagggcatgtgttacataattttcgtcatcgtgaattgatagaataattactttagattcaggatacagctctacaagctgttttgtagcttccacaccatttacgtttggcatattgatatccatgatcacaacatcaggatgatagtgctcaacaatacgagccgcttcgtctccgtcatcaccttcggctaccacttcaaaggtaggttcaaaatccaatatccgtttaacaccttcacgaaataactgatggtcgtcgataataacaatgtttactttagtcacaagccacgcctccttgtattattgttctatatactctagcattcggtcaatatgccttttggctctattttacaaatcatagtcaaagagataacggaaccttaatcataataaatgtcccaagacctattttcgaatctattgtcatcgttccttccaataaatctactctttctttcatgcccagcaagccgaatgatttgtttttcttctctttcgcttccttcaggtcgaaccctttaccgttatcttttatcattaaaatcacaaaatcctttgtgatctcaactttgactgtaatttcttcagattcagaatgctttagcgcattagacacagcttcctgtgcgagcctgaagagcgcaacctcaaactgaggcgctagcctctgatcctctgtttctccaatgcactgaaaatgtattttgaccttcccgttatattcctcggttgtatatagatattttcttaaagttggaatcaggcctaggtcatcaagggccatcggtcttaaatcatatataatccttctcacttcgtaaagggcattccgaacattttggcggagatttttaatttcttggaatccgtcctctgcgccccggtcacggaaaatccgctcgattaattccgatctcatcataacattcgccagcatttgagcgggtccgtcatggatttctcttgagactctttttcgctcttcttcctgcgcctcaataattcttaagccgaaatcctgttttgcctgagcatcagcaagaagcagtccaacttcgcgcaaatcctgattcaagtagttgagcacaactgtaatttggcttactaatgattctgaccgctcaatgatttcctgaagccctagcaatctgcgctccaaatcgtcccgccgttcgcgcaattgcttctcacgctgctggatcatcgtcaattctacctgcagcttatgggctttttcataagcattgcggatttcctcttcactgaatctatgaaaattacggctgacctcggataaacggtttctcgcatggcgggtttgcacttcaagtttatcgccaagctcaatcacttcatacacctgctgtttaatttgtttcagttcttcgaccagctgttcatactgctggcgtgactgctccccgatttgaaaaacctcgtccttgctcccgtcaacggttttcagcatcttcatcaaaatagaatccagcactttggaatccatctttgttttattcataatttccctccgtcacggcgttgtcatatatttttattataaatgtaattgatctgcaaattatgtcgaattataatgaaagaatgcgtatattctagaaaaaaacatttttatatactatctactctttatgataccaaaatacgcacaaaaattctaaagactgtacgaatttgtataggcagtcttttatgcttagcaggagggtcagctagcatgctgcacagctattttactgtgaaagaagcaggagaacacgagattgttatagaaaaatcgcgttttatctgtcatttaagccgtgtttctaccgaacaagaggcacaggaatttatacagaaaataaagaaacagcactggaatgcgactcataattgctcggcttatgttattggcgagaatgatcatatccaaaaagccaatgatgacggggaaccaagcggtacagcgggagtgccgatgctcgaggttttaaaaaaacgcagactgaaggatacttgcgccgtcgttacacgctacttcggaggcattaagcttggtgctggcggattaatacgcgcttatgggaaatcagtgtctgaaggattaaatcatataggtgttgtagaacggaagcttatgcgaatcatgcatacttctgcagattacacatggcttggcaagattgaaaatgaattaagggagtcacaatttctgttaaaggaaatccattattcagaaaatgttgaattcgaaacatacgtggaagaaaaggaaacaaatgctttttctgaatggatgacagaactgacaaatggaaagagtgatattaaagagggagagttgacgtatcttgaaaaagccgtcaatcacataaaggagactgaataatggctgaacgcgttagagtgcgtgtgcgaaaaaagaaaaagagcaaacgcaggaaaattataaaaagaataatgttattgttcgtcctcgcattattagtagttgtggggcttggcgggtataaactttataaaaccattaacgctgcggatgaatcgtacgatgccctatcccgcgggaataaatcaaatcttcgcaacgaagttgtcgacatgaagaaaaaaccgttttctattttatttatgggaatagaggattacgcgactaaaggacaaaaagggagatcagactctcttattgttgttaccctggatcccaaaaataaaaccatgaaaatgctgagcattccgcgtgacacacgtgtgcaattagctggtgacacaacgggaagcaagacgaagattaatgccgcttacagcaaaggcggtaaagatgagacagttgaaactgttgaaaacttcttgcaaatcccgattgataaatatgtcacagttgattttgacggatttaaagatgtgattaatgaagtcggcggtattgatgttgacgtgcctttcgatttcgatgaaaaaagtgatgtagacgaaagcaaacggatttacttcaaaaaaggcgtgatgcatttgaacggcgaagaagccttagcatatgcccggatgagaaaacaggataaacgcggagactttggccgtaatgacagacaaaaacaaatcttaaacgcgctgattgaccgcatgtcaagtgcaagcaacattgctaaaattgataaaatcgcagaaaaagccagcgaaaacgttgaaaccaatattcgcattactgaaggtttagcacttcagcagatttacagcggctttaccagcaaaaaaatcgacacattgagcattacaggttctgatttgtatttagggcctaacaacacatattactttgaacctgatgctacaaatctcgagaaagtcagaaaaacgcttcaagagcatttagattatactcctgatacaagcactggcactttcggtaccgaaagttcaacagacgggactgacagctcaagcagttctggcagcactggcacaacaactgacgggacgacgagcggaagcagctattcgaatgacagcagcacaagctcaaacaacagtacaacgaattcaacaactgattcatcctattaaaaaatgcccggtccttttaaaggatcgggcatttttgcgcagaaaaaaactccggcacataagccggagtttttaattccttttcaccagccgtttataaaactttgtaaacggcttaaatttttcattcacgagtcctgtcacttctgctatgatttgcataaaaataatcaaaatgaagataataaacaaagaaagccaaattgtggcacttttaagtacaatcgcactgatactgaaaataaatccaattaaataaataactaagaccgacatccgatgtgaaaggccaaaggccatcagtctatggtgaatatgcgacttatccggcgctgaaatcggctgtttgtttaatattcttctgatgatagcaaatgttgtatcaaaaatcggtacgcctaatataataatcgggataacgatactgaacaatgtgacacttttatacaggcctaataatgaaagaatcgaaatactataccctaaaaacagtgatcccgtatctcccataaagatttttgccggatggaagttgtaaaacaaaaaccccagcgtgctggcaataacgactaatgagagtgacagaatgagcacttttccgccggatagcgccatgacagcaatcgttgacaggccgataacagaaagaccggcagcaaggccatccaatccatcaatcaggttaattgcgttcgtgatgccgacaatccataataccgtcagcggataagccatccatcctaactcaaatcgttctgttaaaaaaggtactgagaaaaagtccatttttaagccagtgcttacaatcataatggctacacctaattgaatcaaaaacttaacttttgcacttaattgatatttatcgtcaagaatacctaacacaataatgatgaatgctccgactgtaattgccgtcatccttgtttctgtgtaaataccggatgcaagcacgcctgcaaccaccccgataaatatggccagcccgcccatgcggggcatgattttgtcatgtacttttcgattgctgggctggtcaactgcacctattttaatcgcaatcctttttacgattggggttatgattaaaactgtcagcagcgagacaataaacgcaacaacaatgcgaatcatgcgttcgtcaagcataaagaagtctcctttggaattaaatgaagtctttatttatatagagaaccgttccttccattataccttctccttagttattataacaagcttcatcaaaaagaaacacgtataatcaaaaaacgcgcatcccaatttataggactacgcatgtttttgaatccctgtatacttcataatttgtctaaataagcaattccaatcttgtgtgcgagcgatgtttcggcgcatttctttataggtttcgtctccgttttgtccgagaactttttcacaagctgctataaaatcaattggatgatcaccttctacatattcgtatacatacggcttttgcatttttgaggttgacggaagattagtgcctacaacaggttttcctgccgctaaaaattcaaatagtttcagcggaaacacagcttgattatacggtgattgtttatatggcatgatgccaatgtcgataagctccatataatgaggcacttcttttggatctgccggaccggtccatatgacatttggaagcctcagcagctcttgaaacgaaacgtcaccattggtggcatccgggccaacccataaaaatgtccaatcaggcttttgcagggcggcggctttaatcattttaaaatcgagcttcggtttaatcccgccaataaaacctaacactgttccttctctcccctgcagtatactgcgatcgggagcttgtttatttgcagaaaacagctcatactccacaccgttttccacagtatgaaccttttctcgtcctgcagtcagttttttgtctacttccttgtgaagataatctgatgaacaggttattgaatctgctcgttgtataattctcagctctgccgatttaatgacttttcgccggaattcagacagcagatttgatcggccgctgatcggcgccgcccataagtcactgcagtcataaatgacctgatcccaaggatacagcgaagacagcagcgggaatccgggaaacgtgtaccataaacagcaacgttcaccgtttgcagaagcaggtgtaagctcatcgagtaatggggagagcttatgtctgtaaaagacatctgtatatcgtccgaaacgaaacatttttttctgcagcaggtctttgacaacgaattgcctgatgccagaatggacttcttgaaattctttaccttgggcacgcggagccggacatacccaaataacttccttcgtttcctcctgagcagctaaaaattctgccagccggtgccttctgtatctcaattggtcttttccccattcagcagtggcaacgatgacatgaatgattgcttcttttgtttccaccttcatcaccttttctctctgtttgcggctataatctttttttcaccgcgttttttgcatattgaacaaaacaccatgttgctttcataaaatgaagccgttcgatctccctgtagacaaaccacgtttttttcgcagccttccatttgttgctggaaattgagttattgacaagccgatattcagccaggcattcattcattccataggcaataaatcctttttttaaaagagacagccatgtggctaagtcctgtctcgttctgatattcggcatttggatctgtcccgtttgctccctgtcaatcatcaccgtcaagcagccgataattgtatttttcagggcgtcatcgtacgtcaggctttccggcgcatgaataaatttatcgagtggggtcccgtcctgcgccattaagctgtagcccgtgaaagaaaacgcacaggagcgctccatcataaactcaagctgcttttccagtttgtcttttttccatttgtcatcactgtccaaaaatgctacgtagcgcccttgagcgcgttccaacgctttgttgcgagcaaccgcagctccggagttctcttccaaatacaccacatgaattctttcgtctattttttcatactgctgtaaaatgtcgcgggtcccatccgttgagcaatcatccacgataatcatttcccaatgaggatggctctgatctaataccgaatgaaccgtgtcttcaatatagtcacgcgcattataggaaggtgtaatgacagatacgagaggtttccaattggtcatgatcacatctccatcgtatgattttaaaaggattccctgaaaaattcaggaatgacaacgaacataaaggcaatcgtaaggccaatcataacgccgagaactgctttctttttcggagacattccgccgcctgctgtctcacttacggtttcggaatcagtaacacttgccgctttcaggttaagctgtgtgtttttgagctcatacaaaaatctctctttatccactttggaatcctcgcttaccgactcgccttcaagcgcgtctatgctgctgcggatgacggcttctctttctgcatacagcttttgatcgtttttgaggaaggtggaggaaatggcttttaagacagattccgttttatccttatcctcgtcgctatagcttaaagtcagtaacgatttggattccgttttgattgtaagcttctctttgatctctgctacatcttcatccttttcatcaggaagcgcctccttcaaaaaggagtcgctctttaatagaagcggaatctcttctgtgctgttataaaccggatgatcatagctccccacagccaaagtatcttcagctgtatagctcttttgatcagcgatctgtgacggcaggatataccccgccgcacctaatataattggcaccgctatgatccaaatgatatttttttttatgcgacgggctattcttatcaatatatcgttcatataagtctccctgctttttgtagtctgttttatctgtacatcggctcaggcatttgtctggatcgccttaacacattcacggccgcgatgacgagcgccataaacacccaatggaaaaataaatttgaaacagagcttgggctgatacttgataccaggaaactgaccatagcggtaataagtccttctgtgatcagttttgactgattttctaattttctttcataaaacttgtaaagcacccatatgaggtaggcataaacggacagatatcccagcatgatgaacaagccaaaattagcaagaatttcaacaagccagttatgcacctctgccacattgtcagtatcatatacagcataatgctcaagataataggatacatttcctgccccgactccgaatccgtatgaatcaaggaaaaaatgccaagcgtttttcagcagatttgcccgagccacatttgatggaagcctgtcatgaaatgaatgcagcgtctgcggggccagaaacagctcccaaaactttgaatagattttgctggcgaaaagaactgcgaaaagagcaattcccgccgccgacagccatatagccattctctttaaaacaggcggcaatacaatgaagatgtagacagcaatacctgcaaaaatgcccagaaggctggctcttgaaccagtggcaaaaattaaatacaacgcacagagcgagagcacaaggccaattgccttgatgtatccattcttaatgtttttcatcatcgtgatgtaaaaaaagaagctgatggataaaaaggtcgcaaagtcattttgattaaaaaagaccgatgtcggataatgctgcttgtactccggtccgctgtacaatgtggaactcgcaagatgatggtgggtgatatgattgtaaaaaccaatgatcatcagaaataccgtcatcaccagccaaatggcataaacaatcatcagccgctccattttttgcacgtacatgacaataagataaatgaagaagattcccattgccaataaggctaaatacttgaggccaactgttaccgacttggcccacagcagagaaacaaggccatatataaaccaaaaggcgaaaaagagtaaaatcccttttacttgcagcccatgccatctttcaatatgggttcgattccgaaccatgccgaaaatatgaaggcaacccgctgcaatgagcagaagccggtaaaggaacaaactgaaaaatccaagatgaatagcgaaaaatgcattatttaaaaaagtgcaggcgatcaaaatatagattacagccataaagagccgttcttttgttgtaaatgcggttgcaagcgtcagtaaaaacaggccaattgccaacaccgcaagcacaacagccatctgcatgaaacctatatctttatggatggctcccagcaataggacgactccaaatatagcagcggccagtaacgctagcgtatggaccgctgatcgtttgatactcacatgtttaacccctttcctgatgtttcaggagccggcggccgagcctagcagccggcagcttcaaccaagtaacactttttctttttataaattgacgcttcccaagtctttagccaattcttcaagcggcaagcccggaaaatacttgtcagagggttccgttccccgaacagcgggacggccgatagagtgataaatgtatccggctgcctgcatctcttcaagtgaaaataaatttctgccgtcgatgatgactggctgttttaagaggttttttacttttacaagctccatttcttttacttccggccaatccgttaaaatcaggcatgcatcagtgtcttcaatcgcagcatacacatctgtgtaatactcgacctgttcgccaaggatcgctgaagcttcaggaatagcaatcggatcgtatgcttttacatgggcgcccagctgctgcagcattgggataatatcaagcgctggagcggatctcacatcgttcgtattcggtttgaaggctaatcccaggactgaaatggttctccctttgacgcttcccataacagtcaaaagtttatctacaatatgaacacgctgcttttcgttcgtttcaatgacagcttcgatgagcttgaatggatagcctgccgattttgcgatttgaagcagcgcggttgtatcctttggaaaacatgaaccgccgaatccaatacccgctttaaggaactttctgccgatacggctgtcaagaccaacaccatcagcaacttttgaaacgtctgcgccaactcgctcacaaatgtttgcgatatcgttgataaaggaaatctttgtcgccagaaatgcattcgcggcgtatttaatcatttctgcactttctaggtttgttttaatgacaggagcatggaatggctgatgaagttcctcaatgatggcagcggctttatgacttgttgaaccaatcacggcacgctccatattcatcgtgtcatgaatcgctgacccttcccgaaggaattcagggttagatacaacatcaaatgagtatctcccctttgaggctttttgaacgatagattgcaccagtttccctgttccaaccgggactgtgcttttatttacgatcactttgtagccgttaagatgctcaccgattgttttcgccgccgctttgacgtacgttaaatcagcttcacctgttttggacataggcgttccgactgcaatataaataatatctgaggcccgaatggcggacgggatatcgttcgtaaaggtcaggcgctgatccagcacatttttttcaactaagtctgcaagccctggttcatagattgggattaccccatttttcagacttctgatttttgattcatcgatatcacagcaaacaactttattgccgatctccgcaaagcaagtgcctgatacgagtcctacataacctgttccaatgacagctatttttttcacagcgctcatccctctcctgtaaaatgatcttcctatttatattggtcgcagtttcttacgattaaacggacgttttcgtgaccgtctgatactgatgatgcaaggccttggcgttttttcctgcgtcaaattgagcctgcacggtttcatacaagtcatctgctacttccggcttccatatttgctcatgttcgtaccgagtgatcgcttctgccaaggcttgagcggatttcggtttaatcagcagatgttggtgctttccgaacaaagacgacactccgccaacatccgtacagataacaggaacccttagcgccagcgcctcaatcacaacagtcggcatcccctcactgtaagaaggaagcacgaatagatctgccgcaagtaaatagtctcttacatgatgattcggcacttggcctgtgacgatatgccccttctgcgtcagcgtcgattttgcgggaccatccccgacaaagactgcctgaggtgggtcctgcagcgattcgatcgcttcagacagttcaaaaatgcctttctctctgaccagccggccgacatagacagccagacgctgatcaagcgggagtccgagtctttctctgatttcctctttcgtctcctcattctcctgaaaacggctgagctgtatgccaattggcaaaaccgagctgtcaaagcccgaaagctttttggcttcttcctgaagcttgtggctgactgctaaaacaactgacgcagaacctacggcacgcttgaaggctttaaacgctcctttgctgtaatgcggatagacattcacatcactgccatgcaaggtcaggacataaggaatttgcgctgactctgacacgactgccgcagccccgcccgatggcatggcaaaatgagcatggatcagatccggatataggccgcgctgtttcatggtttttaaaacggctgatgcgattctccgatgaggctgcgcccacttcagctggccgggaactgcccgatagaaaggccggtaaaccggtatcccctttctaacctcatactccggtctggcatccttttttcgatatgtctttttcagcatgcggacaggcgctgaatgaaaaggccgtgggcatatcacagtgatatcaagcccgagtttttgcagctcttgcacctgtgtctcatgaaacacaccctctccgggtttcatactgctcggatatacgcttgtgatccacaaaatcttcatgacaaacgtccttttcttagtagtttgcttttcgtttgagggtacgcttttaccaaaagaaagagatagcacagcgccccggccgcaactgaaatggccagccgcatttctgcctgcatactgaagtgttcggtactgaggcttacaccaaacgcgatgatgcccatcgccgcagtaatcagaaatggcttcataatcgactggaaataagctgaaaggttaagcttgatgacatatgccaaaagccagcgcccaatcaggaaattaacaacgctgataatggcatacacccatgcgactgtcagcaggcttcccgtctgtacagctgcaaacagtgataatccgtacagcagcagcacgccggaatcccaataaaacgctaagtcagctcttcctttagccagcagcacagatccatttggattcataagcactcttagtattccgacaatcgccagaacatttaggatcggaacagcagcaagccacttttctccgaaaaccgctgtgataaaggcgtctgacacagacacgagcccgattaaaagcggaaacgagacaagcgccagcatttttgtcatattcagaaagccttctctgatcacgctgttttcatatttgttttttgcgaaaacagggaatgccacccgtgtgacaatcggattgatcttcaaaaccggaatggtgacaatctgataagcgaggttataaatccccaatgcttcagcaccaataaaccggccgatcaaaatcatatcgatatttgctcccagcctgttcacaagacgggatgaaagctgaaatgctccaaaagaaaagaaatccttcatgcctctcaaatcaaaaacaaaagcaggatgccaattttttcggtatactgcccaatataaaatccctttactggactgcagcaggacttgagaaatcacgtacgccaaaatcgcatccatcataaaaaccgctatcgctaaatatccgaatgacaatacatttgaaaaaatctctattttgcttaacgtattaaaatgcagctgcttttgcagcatatactgatattgctgtccaattggcgcgatcaaaaacataatcgccagaatccgaactagaaacaccagctcttctctttgataaaatcccgcaatgacaggactgctcacatataaaagaacaaacagcaaaacgcccgtcataatgttaagccaatacaatgttgacagctggcgctccgtcgcgtcgtctctctgaattaatgctgctccaaaacccatatcgagcacaatctgggcgaaaactgtaaccgttgtgatcatgccgacaagcccaaattctgttaaggtcatcatatttccaagcagggcaaactgaacaatttgtatgattgtaatacacatggttgaaatacttgtccactttgcaccgctcatgatttgttttgtaatacttggcatcatattccctacttctttttaagctcagattgatggtgaataatggcattccgttttatcttgcaccatcacccgtccaaactactttacaagtttttaacataatttttaattctaaagtgaaagtcagattgcgaatgtaatataaatcaaatatcagcttttccttcggcgtcatatcgtaaccgccgttcacttgagcccagccgctcaatcccggtttaacagccagacgctgtgtaaagcctggaatctcattctggaatttttccgtaaatacgggccgttccggacgagggccaatcatactcatatcgcctttcagcacattaaacagctgaggaagctcgtcaattctcgttcttctgataaaagctccgatccttgtcactcgcggatcttgcttctgtgcccaaaccgccccagacttctcggcatctattttcatggaacgaagcttataaagcttaaatggtttcccgcctttccctacgcgttcctgcgtataaatggcaggtcccggcgtctccaaacaaatcaaaattgaaaataccgcaatcattggcagcgcaatcgccaacccaatgagcgcaaaccaaatatccattacgcgctttattgccaaataacgagccgtcttttcagataatgtaaaagaatgtatttgctgaactgagaattcacgactcacattcatgcttttctctgcactcactgacacacacctcacgatttgtttgggatgttatgatgacctatgccagtcagtttagcagacggatgttaattggatgtaaatggtatgttaagaagtgtgaattacgtgttttttctgataaatgttgttaatactcttttactattttatatacaagtcctatttgttttaatcatttcatataaaaaagagacaaatctgtgattagatttgtctctttcgattatctgtaataagatactgtgccgtcatgaatagcttgtgcagctttatctttataaaccgcttgcttcaatttacttgcatctgatgcattagtgataaaggcagtttcaactaaaacactcggcattttagaatatttaataacatagaaagcggctgtttttactccccggtctctcgttccaagattagccgctaactttggttgaatttgttcagccagtctcttgctatttgcagcttgatatgttgtatcgtagtacgtctcacttccatttggtgatgagctatcattagcatttgcatgtatactgataaataaatctgcttgtgcagaagctgctttatttactctctcctgtaaagaataaaaagtatcattagatcttgacagtactggaagagcacctgaagtatttagctttgtattgactcttttcgctatatcaaggttgacttctttctcaaggagtccattgccgattgctcctgaatcttgatcaccgtgacccggatcaataaagattgtttcacctacaactggattctttagctgattagcaaccttggtgcttacggcaggagtgtttccgataatcgtaaagtttgacatgtttttacttccaataattttacgggctcctgtagataaattttcaccatttgtaaggataagagattgcttcttcttagctgccagtgtagctcctgcaatagagtcagggtagctgaatccattgcttacatatacgatgcttgttgataaattaagtttttgtacgatatttgcagcaagctcatatctgtttgaaccactaattcttgtaggagaaggtaacttgttgtataccgtattgctgatacttccagtgcctcctacaacaacggtactcgaaattcccttatcttttatcacagacgttgtcgcactatttatagatgttttatttgtaaaaagaattggatacccgtttttcgctgcataaggaatgacggccggagcgtctgcatataagaagccattcaaaataacagcttttgaagtcgcacccatcgcttttgccacccgtgcagccgtatcataacggttgcttcctgcaattcgtttaatacttatccccaaacttttaatctggttagcagtgttagatgaaacagcaggtgttccgcctacaataattacatttttagtctgcatctctttcaatcttgttttcgtttcatatgaaagcttatcagaattagtgtaaagcaatggcgcattcttctggtaagcaaggggtgctgctgaaatagcatctgcataggaactcccaccaacaattacagctgtacttgctgttgaatacatttgctttgatatttgtacagcagtgccgtatctattgcttcccccgactcttttcactgaattatcggccaaagctgttggcacaaaaagtatgagccccagaaaacacattgttaggacttttatataagaacgcaattgatttcctccttaagtggcgttatatcctaaaataatcaataacttgtcagagttgtacctggatagtaaaatttcaaaattgaactatatgaatctccagcttctgctcttgcttttgctccatattgactcattccgatcccgtgaccatatcctttaccgctgattgtgtactttgaagtatctttttttacagtcacataagtacttttaaatacagtcgctccaatcattgttcttaactcacttgttggtacactaatggttgtaattttgctcaagttataggagccagtactgcttttaacaaaatacttcactttcatcgatgctgtttttgcacgctgcccttgtgtcgttccactaaagcttaaatcgtcaatacttgcaattttgacagaatcagcgcttgtttctttatttttcaagatccagttcttaactccggaaagtcttgcagaatcagtttcagtcgctgaagaccaccaagaagaaggcttcgttaagtccaaagatttcgtatctagctgttgttttgacaaagtaagcgtccagcctatttgaggatcctttgtatctttttttgcaatcaagtaaggtacacttgatgaccacacttcattactagcttctgtgtaaccaccattactggaagaataagctgcagttataagagatccattatatttcagaactttccccttcgtttgctctaccgctttattggtattcgaattccaactgtagccaccataaacttgaaaagcggttgtatcaggtacagtagttcctgtttttgttattgagtaggttcttgcagcgacagtctgtgctttaagagcctcaagtgaccagctagcaggcatttcattcggaattactccttttaagtaatcctcaaatggaatattctcatttaccggtcggatatatttagtagactcaatagagaaattaaccgtgccaagatactgctttccatcaagactaattctgtttgaagtagaatagttttctggtttaattcttagggagtttccgtaagttttgatgttttcaaggtttaattttccgctgttgatttttagattataggtgctaccgtcagctaaataaaattcatcagcaagtgaattctcaacttcagcagaaattgaactggtacttccaataaagtcgtatgcatatgtggctttatctttcgttatacttttagccgcagccggaacgctatcttgtttaataaataaaatttggctgtttttcttcgaggcaagcgaagcgcctatcagtacgtctgcatattttgtcccgttcgtcattacgactttatcagccttcaactttagttgcttaattatatttgccgtaagttcatatctggttgatccaggaatcctttgcacagttgaagtttttttaatttggttttctacactatcactgacgctaaatgaactgcctataatgatgacttgttttggcaaattataatccggaagcttgtctttctctgtaagcaaaatagggtatccgtgtgctgctgcatatggagcaatggctaaagcgtcttgaaatactcttccggttacaacgatcgctttatcatagctgcccatttgctttgcaatattttctgataagacatatctattttttccgcttatccttttcacagcgccatatgatttcagcttgttttctacatcttttgaaatgcttcgcgctcccccaatgattaaaatattatcagggttaaacttagcaatttgtctttcagtagtttttgttaacgtgtcaggctgagtaaataaaactggtgcgttcagttttttcgccaatggaataacaggcaatgcatcaataaaaatatctcggttcaccaatatcactgtattaggatttttccactggctgttggatgcaagagtcgcagtttcgtatcgtgaagcgcctgcaaaacgatccgtaacagcaacattatctccagttactttataaaatcctgttggcgatagactgatgctagatttatttccaatataatttgacaatttaactgagatgtttgagtctgctgcaaaagaaactgatggaatcaataataagattgcagcaagtgaacacactatcaatcgtttgcaagatttcaaaatttcaggttcctccctatatcttagttggcacgttcaatatcttttaacagaagctgaccctcatcatttttttcatatgtaatcgtgaccttatctccactgttaaacttatcaagatcacttgtcgattcttcagtgatatcaagactaaccggctcattatctactgttacttctattgtatgagtatcagctaaccctacataagtaccttcttttgtttcaatgttactgtctggcgatacatcttcaccttgactcttttgactattaaccccgcaacccgaaagaagcaatataaagaacagtaaagcaataaattttttcatttttttcacctcattatattttatcgtcaacctattttatattttaaagaaaaattaagaaacaatgaaacttttttttataaaaaacgactattttaggatttcattcttgtattaaatagagttgtatttattggaaatttaactcataatgaaagtaatttaacagacgaggtgcaaaggatgagaaacgaacgcagaaaaaagaaaaaaactttattactgacaattttaacgataatcggacttcttgtactcggaactggcggctatgcatactacttatggcataaagcagcttcaaccgtggcaagtattcatgaaagcattgataaatctaaaaagagggataaagaggtcagtatcaataaaaaagatcctttttccgtcttaatcatgggtgtggatgaacgcgacggcgataagggccgtgccgatacgctcatttatatgaccgttaacccaaaaacgaatacaaccgacatggtcagcattccgcgtgacacgtatacaaaaattatcggaaaaggcacaatggataaaatcaaccattcatacgctttcggcggcacgcagatgacggtagacactgttgagaacttcctcgatgtcccggttgattattttgtgaaagtgaacatggaaagctttagagacgttgttgatacacttggcggcattacagttaacagcacattcgcgttcagttatgacggttattcgttcggcaaaggagaaatcacgctgaacggaaaagaagcgctcgcttatacccggatgagaaaagaagatccgagaggcgacttcggacgccaggaccgccagcgccaagtcatccaaggtattattaataaaggcgctaatatttcttccatcacgaaattcggagatatgtttaaagttgttgaagataatgtgaaaacgaacttgaccttcgataacatgtgggatatccagtccgattacaaaggtgcgcgaaaacatattaaacagcacgaactaaaaggtacaggcacgaaaatcaatggaatttactactaccaagctgatgaaagcgccctttccgatattacaaaagagctgaaggacagcctcgaaaagtaaaacaaaaagaagcttcgcacaatgtgcaaagcttcttttttatttgcctgtaaatgaatccggttgttctttccggtacccgtaatgaaacagcaattcttccacaatccggcgggaagcctctccatctccatacggattagaagcctgggacattttcttgtactcatcaggatcagttaacagctgttttgccagctgataaatgttttcctcatccgtccctgcaagtttcaacgttcccgcttccactccttcaggccgttccgtcgtatcacgcagaacaagaaccggtttcccgagagatggggcttcctcctgcacgccgcccgaatctgtcaatataaaatgcgatttcgctgcaaagttatggaaatcaatcacctctaaaggttcaatcagatgcactctgtcagaatcaccaaaatgcttctgagccgcttcccggacaacaggattcaggtgcacagggtaaacgacttgtacatcttcaaattcctctacaattctgcggatggccttgaacatgttttccattggctcacccaaattttcccggcggtgagcggtcaagagaatcattttatcctcacccacctgatcgagaacaggatgtgagtaaccatccctaaccgttgtgttgagtgcgtcaatcgctgtattgcccgttacaaaaatagagtcggcctttttgttttcttttaataaattgtctttcgcctggcctgtcggagcaaaatgcaaatcagcaatcgcccctgtcatctgtcgattgagctcttccggaaacggggaatacttattccctgtacggagccccgcctccacatgaccgacagcaatttgatggtaaaaagcggctaggcttccggcaaacgtcgtcgtcgtatcaccatggacaagcacaatatcgggtttgatatctttaaacaactcatccaatcttacaagtgcgttagacgtaatctctgccagtgtctgccgctccttcataatgttcaaatcgaagtcaggcttgatgtgaaacgcatctaacacctgatcgagcatctgtctgtgctgtgcagttaccgttacataggaatctatttcaggatattttttcaattcaagcacaagcggtgccatcttgatcgcttcaggcctggtcccgaaaacggtcatcacttttagttttttcatatttgtcacctggttttctgctatagtaaataaattcatactacatattctacatgaaaatgcatcattttaaatcatttcattcttgattcaaataaaatgatataagttttaatattaaggataaagcttgtttaaaaatggtttatccgatatcataaaaatgtgtaaaaacatattgaaaagggtaaatagagaatagtttaaccataaattttttcgatcataaggaaggtgccttttaaatgaaaaaagtacgtaaagccataatccctgccgcaggtctcggaacgagattcttgccggctacgaaagcaatgccgaaagaaatgcttcctatcgttgataaacctaccattcaatacataattgaagaagctgttgaagccggtattgaagatattattatcgtaacaggaaaaagcaagcgtgcgattgaggatcattttgattactctcctgagcttgaaagaaacctagaagaaaaaggaaaaactgagctgcttgaaaaagtgaaaaaggcttctaacctggctgacattcactatatccgccaaaaagaacctaaaggtctcggacatgctgtctggtgcgcgcgcaactttatcggcgatgagccgtttgcggtactgcttggagacgatattgttcaggctgaaacaccagggttgcgccaattaatggatgaatatgaaaaaacactttcttctattatcggtgttcagcaggtgcctgaagaagaaacacaccgctacggcattattgacccgctgacaagtgaaggccgccgttatcaggtgaaaaacttcgttgaaaaaccgcctaaaggcacagcaccttctaatcttgccatcttaggccgttacgtattcacgcctgagattttcatgtatttagaggagcagcaggttggcgccggcggagaaattcagctcacagacgccattcaaaagctgaatgaaattcaaagagtgtttgcttacgattttgaaggcaagcgttatgatgttggtgaaaagctcggctttatcacaacaactctagaatttgcgatgcaggataaagagcttcgcgatcagctcgttccatttatggaaggtttactaaacaaagaagaaatctaaacataaaggctattggacattcatccaatagcctttttttatttcaacatcaaagtcaatgtatgctcttcattatcaactgcgaagacctgatcaacggcctgccgcaaaaattaataatcccagacaaacacactgattgtagagttaaacaaactaaatgaaaacataaatacaaacatgcagattaaatagtaaatatcttgtattcaatgcaagctaagtaaacaccacttgctaaaagaacaatgactaaacaaccagcattacaaaataattaaataaatttgaagcaattacaacagaaggcagtgaactgtcggaaagttcattttggctaccatattaatcccttttaatttaagagccaggccctcaaattcctctattcggtcggcatgtccaaatatatccatccatcatttttatgatttgcagaaatgttcattatctcaattttcacgtttaacccttcgtcgaagagttaactctatagacttatttttttaaactggtcaaaaaaatcagtgtaataatccattgtataatgcacataaaatttgccccatggatggttttcaaaggaattatagcttttatttttaaataaatctatcgcctcgatatcattgaagctatctaatacatatgcgtcaaatttattccaaatcttattataataatcaacatcaattactttgatgttccctccatttataagcaattttttctgatcttctttatcaaaaaagtgatgaacgtttcttgcactatttaagataattttggttttagggcaatttaatctgacgtagttatagaaaagattaaatttctgtttccatagtgcaaaataattttcaaaatgatcttctatattaaaactttgttttttattttgaattgtaaatttataataattcgttttagggagagtccatctgttatttgtaacaaactggttatctgaaatttctacgtagccaaaatgcacatctgcgaaaaagtccaaaatcaaaatgtctggctgaacagatttaatctcggttagaaagctattctcaaaatccgtctttaaagtgtttttttcatgattagacatgttctcattatcaataacaatgtagttaggtttactcattgttgaaataatggacgattggttttgggtcaatacacaatcaaaaaaatttttataatcagcattaaattgagagttaaagttatcacgtgtaacacaactaccataaacagctacttttttcatttctttattccctctttaatattagttcctagactaataatttgttgataaacacgtttacagttttctttatccgtatacttataaaattgatttactctatcaatatatttggcatccattatacaatcgttttccatacaatttatcagcttatcaactaaagcatctttatcagcaattacttctccaaaccccattgaattgtaatcaaaataccctttttccaagtgatttttttcgtattggaagtaaaaaacaggttttttaagataagcaaagtcaaatgcaacggatgaataatctgtaactaaaatcgcactattattgaaatgatctcgataactttcattaatgtccgcaatcctcactgaactatttttgttgaaatctttcaactgctgaacaatatttggatgcgggaagaatacgatctcgtatcctttttcattagcctcattaatgagtttagcatcatttaataaattattaagttcattaaaataaactgagtttttaaagagtggtgagtaatctcttttccctgtttgcggatttatttttcctactaaatgatttctccatgttggcataattaatatctttttatgattatgattaacaagcttatcaaatctaggaaatccagttagaattacttctctttttgaataattataatgaccattaattatagactcatactcaggttgagcggctgtgataaatagtctaatatttttcttatacttattaagccatcccgaaatatcatctttcgtaattccatgttgaagaaaaacaaagttaaatttaaataagtccttataatatttcctcatattcacaaacgggttgactacataatcatctgcatgtgaagagataatttcatcggcaagtaaatgtaaaaatttgtgcttaggtgacccgtatgcaacaactggtcctatttttttcagcctgttataatctggactatctttactgataataaaatattttttgatgccgtcattctgctgcattgcatattcaaataatgcttcagcattatcatctgccttgttgattctatccataaaaagccatactcttttatttttctttattttatagaggtgttccataatctttcttacatttgatgctttctcagcacctattttattaaaggtcttaaaacgtctttgagcccgcttttcttttgctctaataatctgatttttatcttttagaactactaaattattaagtttatgatcgaaataaatccctataccatttttggtatagaaatcaactatatgtttatccagcgggaataatcgtccaaagttaatttttacttttattagttttccatttgatgaaatcatcatttcaatattcgagttatttgcaagctcaccaactgggatatcaaccttaaagcccaggtactctttaactggcttatttaagcaatataagttgtgtactgttctatcaattttttcggcatgatatatcttgtcattgacacatgctttcacttctaattctgcggcatcaaataatgaaccaaaattaccttcaagggttaaaatccccttttcaatgcttaatagctccattgttatagcttcatatctcatagaattaattaatttctctttaaaatataaattcacattacgattcaaaaagatctttttaaatacattttttttatttcgatatttcaatttgattaaaaaatattttctgtgcaagtttagagatttttgttcaaagattatgtcgtcatctataaatgcaagtattctttctagcaagtcaaaaaactcttcaacttccttatccgtcaaaacatcagttctgtcttctatatttattctccactgcaagtcataggcaatcatatactgaatgtatcttggaacgtatcctaaagttgtaatactatgattaattaattctcgagagaaattcttcaaataatccacataccattttttatcatttttacctgtttgagttgcagatgacgcatcttctcttcgtcgataattatattgtccttctgacacaataccgtatacttggcgcttcattataattttagtcagccattcactatcttcagcgtaggccatatcttcattaaaaaagtgatttttaacagcttcttttttcacgaatgaacttggtgctgataattgaattcctgtatgttctttcaagatatgaactagcctagttttatcaaatttataatttaataagtgtggaccacttgttttaccaaacatcatcattggaatagaaactacatcgactttagaataattcttttcaaaaaaatcatatacttttaaaagggttgaaggggacaatgtatcatcaggatctaagaaattaatatatttacctttggcatattttaaaccctcattacgcgcactacttgctccgccattctccttatcgataaagactatattttctggatacgcttctttatactttaagcaaatttcccctgatgcatcaacacttccatcgttgactaaaatcaactgtatatgatgctcaaaatcaagtgcctgatcaattatgcttgttattgcttcatctaaaaattcttcaacattgtaaattgccattataatagaaaagaaaaaattcttttgttccaagtttttcaatctcctttaatttatttctttttactcaagggtattagattctaatcaacttttgaaatattctagttaaaacattaactttttgaagatcaattaaattgttgtctttttcaacaataaacctaaaaaaagtaactcctatcggaagttttaattgatatgaagaatattttctatccctaactgtggttccccaaataactatgttcttatgttcttgcttgtttattaattttgcttttctcaattttcttccataagagatataaacactatttttatcgttaatcacagactcttcattactcaaacttaccattagctcaattgaaaatttattgactttccatgaagtaataacgattttttcattttctagtttccctaattgaataagtctgttgacaggataaccccatcgtttaaatgaaatgagatactcttttaaatatgttttcatgttttgttttacaattaaattctcatctatatatttcaaaacgtgaaataattccttaaaaaactcactctgttctatcttatttagcacttcataaaccttgttattgtttttttgaaaaataaataattttaaatgattaagaattaaacattgaacataaggtataacttcgctgtactcttctaatgatcttttaaccatttcaccatatccatttgtaagtaaaaaagtatacctgttttttttagaccacgaagtgtctactagagaatcctcactttttctttttctatagaaatatttagcggcaggaataaggccatatttttgttctttaattaaaaacgtattaataaataaaacatcttcccaaaaatccattttttcattaaaagcaagaccaagacgttctattgctttttttcgaaaaaatgttccacctatgtgataatgaatagcagtgtaattatcagttatgtttacaatgctttcaccacttttaaatctataattaagtgagtgttctccatttttattatcgaagaaaaatagcggcagtaccgctaaattaatatcggtatgcttttcaaaaaactttaatacctcagcaatagcatttagtgagactttgtcatcagaatctataaaccctatatatttactattatcacaaacttttaatccattatttcttgccatactgacattcggttcatcttgataaataattttaatattattcggatatgcagttgcgtattgttcacatatgttttttgaattatctatgctattattttcaatcaatattatttctatgtttttttcaaaattaattgtctgatcaataatactgtcaatggcctctcttatatataatcccgaattataaacaggcattacaattgaaaacaacatctcaagtgctcctttaaaataataagtttttatccgagtagtcttccacaactttttttgaatgaatcatcttttccaactaacaaaattggtcataaaatgaagtaatgttttcatcctgtttatagtctcttgttttatgtatggattcaatttacttttatgttgttttaaaaagaggtcccggagcacacttttcaaaatcataataaaaatctcttagtttatctctataaaatttaatatcgggaacataacgcctttttaaaccgacataataagcaaatactgaagaatagtctgttattaatatatctgatattaagtataattctctaatatcattatgatcagaaaaatcataagcaaaacccatgtattcagttaagttaatattttcagatacaagatagtggacccttaaaataacaatatattcattacttaattggtctttaagactttctaaatccaacaccatattaaatttatatttacctttaacataaaatgagttatctctttttattttcagcattccttcattgctattttttttatataaaaaatcgttcctcggatagccctattcaataaacgtctttttaaactgaaacgcatttttaaaaattttcgtagagtaagcattaagggaaatgagataaccgcatttactgacttctataagaaagtttcttttatattattcagtcttcatgccgggcatatgtactttatccatgtcatttgcatttaggggagttccgtgcccagtgtgcacatatgtagtgtttctcggttttagaacctatagcggcaagtggctgtttgttatccaatattttgatgtagccaaatacaacagccatttgagagagattttttcaaataattctcatctgaatcatcaaataaatctttgtctcttttatctacactccaaaatatccatattcatatttattcttattttcctcaagatactcgaaaattgctcttggattacagctgaattgtttgcctgaatagctttcgaagatgagtaatctttcgtttctgggcaaaagcccaattattctaaaaataattgagtatacactgaccaatagtcttctatatttcattaaaatctttgatttcattttagactctttaaatatcaaagaattaaatacttatctcagcaaacaagaaaaaaagaagcaactgaatgattcaagcctcttttagttagtgcgtctataaactagccatgtgttttttgatttggtagttgaaatggcttttgttcttgaaaggtaaactttccagcagcttcatatgtccgtagtgaaataaatcaaatgttccgtacgttatcactttcttcatgagataacatcaccttccaactgagagtaccagaaaaaaaccaaaaactttaacaggttgtttatcatttcgacatattttttacgtaccattaataatgaacaataatagcataagttcctataaaagttaagactctttaaaaatgttaatcaccagcatttttttgtatcaccgttgtattgttgtatattttttgcaggtccaatatcttatctataccctttataacgagttttctttttcggaaaaatcgattcttttgtcgcgtttttaagtgaaacgttttctttctgcaacaccatttattttgtacgcccttctcatattaatacatcgtcaaaacatgaaggaattgtaatacgaatgttaaaagttcctaaagatttttgcggtaagatagagtaaaacacacttgtttttatagacatatagatgaaagaaaggttgatacgatacaaacgaaacctattaattaattagataaagaaaaaaccgagcttcttgagaaagtgaaaaaagcttctaatctggccgacattcactatatcctccaaaaagaacctaaaggtctcggacatgctgtctggttcgcgcccaactttatcggcgatgagccgttcgcagtcctgcttggagacgatattattcaggctgaaacaccagggttgcgccaattaatggatgaatatgaaaaaacactttcttctattatcggtgttcagcaggtgcctgaagaagaaacacaccgctacggcattattgacccgctgacaagtgaaggccgccgttatcaggtgaaaaacttcattgaaaaaccgcctaaagacacagcaccttctaatcttgccatcttaggccgttacgtattcacgcctgagattttcatgtatttagaggagcagcaggttggcgccggcggagaaattcagcttacagacgccattcaaaaactgaatgaaattcaaagagtgtttgcttacgattttgaaggcaagcgttatgatgttggtgaaaagctcggcttcatcacaacaactcttgaatttgcgatgcaggataaagagcttcgcgatcagctcgttccatttatggaaggtttactaaacaaagaagaaatctaaacaaaaaggctattggacattcatccaatagcctttttttatttcaacatcaaagtcagtgtatgctcttcattatcaactgcaaaaacctgatcatctgtattcacaagaaaacgcttcttgctgctgtcatacaatacatcgctatcacttaaggatagtgacgccgggttgataggagaaatgttatgaaaaataagctctgttgctttatcattctccagtacataactgattttttcataatcaaaattcagcgtttttctgccgtcagccttatttccttcagtataaccattcaatttcgattgaatgctggtgctgctgtctcctaggaatttcagaaagtattcataggaagatgctgcgttttgcgagacataagacgtaaatgcagtggcatgcaattcagcgtgtttcatgttagttgcaacagcgctctgtttcacataataagagtgcccgtcaaactttattttcgctgcttgtttgccttttgcagctaccgttacttttgtaccgaatggcagtgtaacgtcagccttctgtttcaaaccctgatccttataagcagccgctttttcatttgctataaacccttgcttattgattgcagttaagcgttcctctgacttgccctttgcatcgccatgatggttcttcacttcattttgcggaatagcgccaaacgaagcaattgtacgaagcggggcattaaagaacatcgttcccgccatgaagacagtcagaatagacaaaatagcaatttgaatggcattggccagtgatttcggctttttcttctttttgcggaaacgggcaaacgcttcaggatcttctttcttcctctcttctgtctgctcttttttatatgtctctttttcttttttcgatagcttattaaaccagtcaataaacgctttgtactctttcacaaccgtttttgtttcatcaaacatacgaagctcgccatagtgcatccaagcaacacggtcacacatcttttcaatctgaccgattgagtggctgacaaagaaaatcgtttttccttgctttttaaactcatttattctgtctacacacttctgataaaacgtttggtcccccacagaaagagcttcgtcaataattaaaatgtcaggatcaatatgcacggagatcgcgaaaccgagacgcgacttcatcccgctggaatagtttttaaccggctgattaataaaatcgccaatctcggcaaattcaacgatgctgtcatacatatcatcaatttctttattggttaaccccatcatcaaacacttgagccggacattgtcccggcccgttaattggttattcaaaccggcagcaatcgcaatcagcgacggctggccgttcatttcaatttcaccgctggtcggcggaataattttagccagcaggttagacatggtcgattttcctgacccgtttattcctacaaagccgattgtctccccttcatacacgtcaaaggagacattccgcacagcaaaaaaaccattatccttagccggaaaaaacaatcctttaatcttgtccgattgttttttatacaaatgatactgctttgaaacatttcgaaacgaaacttttagtttcatcgtaaaatctccttacgtattaaagaaagtcaacaaacttgtctctgaatttcatatgcaggatagaacctactaacaataaaaggaatgtgaacaaccaaaagtacagcgtgtacttcatgtcatggaaaaaccatgctccatctaagaagctgttccggaatccttcaataatatagaatagtggattcaacttcagaacaggcactaattcggggtggctttgaccgagtttcgcattaacatcccaaaaaattggcaacaagaaaaacaaaagtcttgttacggcctgcagcaaaaattgataatctctaatcagcacactgatcgttgagttaaacaaactaaacgaaaacataaaagcaatcatacagatgaagtaataaatatattgtaaccaatgcacactcgggaacacaccattaactaggagtacaatgatataaatcaccatcatgatcatataactaaataagttagatgcaattgccacggacggtagagaactaatcgggaagttcattttagccaccatattaatgcgcttaaatacactatttgatccatcaagtatagttggactgatgaaaaaccatgggattaatcctgccagcatccaaataataaaaggcacttcgcccgctccggttgtcacaggaccgccctttctaatccccataccaaatacgaaccagtaggccagcatttggataagcggatttaagaactgccataagacacctaaataattcatttgatatttagacttggtttcataagccgccaatcttaaaattaaaggaaatgacgttatttgctctctgagtatacgcaacaaatcattcattttttatcttccttagacttaattgtttttgggaatctttctgtttaaaatttgaaagcaccgctgattattgtaacagatcctgcattttttttcacttctcaacaagtatctaaaaagctgccgaaatatcgacagctatacattttataaaataacctaaattattcagctttaaatacagtattaacaaccttttcagatgaacgtcctgactctaaatagcaaaacttatcatagaaaggaccaaaagaaaccggaagcttataatcaggcgatgagatctgcttgatagcctcaatcgtttcttcagtagtttttaccaaaggaccaggagcttctttttcaaaatcaaagtagaaaccacgcaacttatcccggtaggtctcgatgtcagggacaaagaatagcattggccgttttaaatttgcaaaatcaaagaatactgaagaataatcagtaatcagcaaatcagaaaccatatacaattctcgaatatcctcataagcagaaaaatcatatgcaaatccttcaaaaggacctaaatcaaaattctcagctaccagataatgcattcttaagattacgatatattcatttccaagctcttgtctaagttgatgcaaatctaaatcgagatcgaacttataacgcccttttgcataaaactgatcatctctccatgtaggggcatataaaataacctttttatcacgaggaatatttaacctactctttatcaatgatattgtttcctcattattatcattatgaagaaaatcatttctaggatatccagattcaatcattgtcttgttaaactgaaacgcccgtgtaaagatctcagttgaataaccatttggggaaatcaagtaatcccaattagaagcttccttgataaaattccttttatattttttggtgtttgtaccaggcatatggacttcttccatatccattgcaagtctttttaaaggtgtgccatgccatgtttgtaaatatgttgtatgactaggtttcggaatccataatggaagccggctgttaacaacccaatactcagctcttgccatagcgaagagccattttaatgagaggcgattaatgtaaggaattcccttttcatcaaaaggcgctgaatattgtttatttacactccaatacattttatactcagggtggttttcccgcatatattcgtaaatcgctctcggattacaactgtattgtttcccattaaaactttcaaaaatgactgttttccttttaactggcattctgctagccatcatgaatagagatttgtatgttttagtgattaacttgtttctcatttttgtgatcttttttatttttgatactaatctcttcttctttcctttaataaagtatttaatccttgttttcaggctatagtcgtttactctgatacctagagtctgctttttctttttcttaaagacttcataacgaactggtgtgttgtttgttttaataatacttactaatccttttaatttgttttttcgatctcctaaaacaagagcagtgctgttgaactgaatatccgttccttcatcgtcattgcatatatactccataaaaagacgataaacataacgtttttcatttgagaaaggaatttctttcaaaggcactttcacttcaaaatcatacagttccggaacaaaaccatctgctctcatgttttccaggccatgtgtttttctttctagcttgattggaaatttttcctcaataggtgtttctccacccttttttaaaataaggttcaagttttttatccgatattgattttcggaactcaggtaccccgcataacctgttatgcttatttcttcagagctaatctcgatttgatcaaatctgatgattttggcctctcttttcaccttaatagaaaagttgcctttatcagttgtataaggtaaaatcaaaagttctgtggtttgatcgacatgaaaggcgcgctcaattgaatttacttcagcagaaagacgcttcaagagtggttcctgctccgcatcttcatatttttttcgaaattcgacataaaaatcatatgtttgtcccatttcaacaggcataggcaaaacatgagcatttatctcagttttatactctaatgagccagtgttttgaagcggaaattcagattccgttcctgaacgtctctctttcagctttaaaaataactggtaatcctctaaaaattggtgttctgaatcaattgagattaacaattcaagacttcctaaattgtttttcaagcttttcaaaatacatttaatcacagtgttttcaatcattacttttttctgctcctctgtataaaagctctttcctttttgcttccttttattagtgtcaactactaaggacattacccaaaatattaactctcttttatttccgtgaccctccaagagaaattgcctttaactgttgtatagggctctactctatagccattattagtatctatactgtttcctgacaattttgtttcttcactcgaaagtcttcgcattgttttaatatggccatttgcattgaaaacaatataaaaatcaataacttgggttttattagcagctatcttttcaatatttacatctttttcgagatcaattacaaacagttgatcattttgtaagtttgttgaaataatttcagccttattctttctgtccaagcccactaaacgtatttttttaatatcattatgatcaaaattctcaatgtcaatttctattttagttttatcaaaatcctcagtataggaactaatagaaggatctttttttccaacctttttagagaacttctctctttctattcgcacctcaatcatctgattaagagcaaaagcccaattttcaatatagttgggtcttgaatatttttcagccattttaaaagcttgttctgaaaatttttgatgagtactttcatctttcatcaaagagataatagcttgacccaatttctctatattatactgttcaatgacatatccatttgctccgtcagtaactaagctccttgctccgtaatcataatcgtatgttacaactggacatccattgctcagtgcctccatatttgatagaccgaacccttcaaaatgagaggttgaaatggttagccaagctttttgaaactctgagtcagggttatccgtatagcctttcaaaaagacattattctgcagtttggtatcttcaatttctttttttattttttcgaaatcttcacccgatccgaatatatcaagttttgcttcaggaatttctttcacgactaaactaaatgcttttactgcatgtatcagatttttcatagatgcaagtcttgaaataatgacagctttgtatttttcactcggcacattcaatacagcgggatcaagaggcttatcaattgtatgcggagtaaagaaaaacgtctcttgttcccctgaaatcaatttaaaatcttctagctgctcctcagttataaaaaagacagcatccaaattatacatctgactaaatacttctttatagcgacccttaatttgatatttattgctgccgtaatgcttgttatgaataattgctccataataggaagaaggtgattttttcactttaaagacatgtttgtcttgcggtctgctgtccactaaaaacaacttaggtttatcattttgtttttgcagatattctatccaatattgacgcagttccgattcatcttttacttttatctcaccctcaagggagtaccaaataatatgagataattgaacatctttttcttcattgttccatacatagagtttgtctaaatatacttgattttggtcattaatatattcctgcagatacatcttgtttagctgcacatcataatgagtaacgagaactaagtttccgttcttcgtatattcctctctctttatgagctggtttttatcattccaatagtcgacgtaccggatagtttctccatctccgtagtaaattacagacatttcattgttcttcttaccaaacaatctcgacacagtttttgcaaattttcccattccaacttgcttttttatctggtcaaggcctatcctttcttcgtatgatcttttcccatttgttctaacacttaaaaaatcatcgaatagattaataacacttgtgaattttttatcaatcttaccgttgctgtacaattcatcaatttttgaagacaactctaaatcaaaacgaaacgttaagaaaaaggtgttttggttacactcttctccaaataattttgaacgcaataataatgatttcgtcagaccgccataattacttggcagtccaccagagataaaataataatccatgtcaggaatttgttttatattagattcactcaccgcatgtaaagacaattttttactccctttcggcatctagaatatatgatcattgaaatttatatctacccggatactttagtcacaaaaatcaatgtaagcatcaaaaagtacttcttatttcaataagaagtactttaattagatattgaaccaatgatatcaggatcctaaattataaaccagcaatttcctctttgatctttgttgtagagatgccttctgttcttgggaggtaaacaacctcacactgatctttgagaaagtcaaatttaccttcccagtcatcccccataacaaaaacatcaatattatgatcaataatatcttgctttttttgctcccaattcttttcaggaattacttcgtccacatatcgaatggtttctaaaattaatttacggtgctcatagctgtgataagcttttttttgcttttgtaaattgaattcatccgttgaaatagcaacaactaaataatcaccaagctgctttgcacgctcaagcaatttaatgtgaccccaatgcagtaaatcaaaagttccatatgtgataacttttttcatttaaagaaacgctccttcctaatgttaaacactattaaaaacactactgacgttagcgattaaattctaaaaacctgtttgtattccttatatcgacatatttctcgtatgtcttcactgatcattaattatagcataccgcctaaaaaaggttaagtactcatgaggagaaaaacattccaaaatatgtaattacactcagactccattggcaccaaggtctgttgttcattcgttcattcaattgtaaaattggaaacatatttaaatttaatgtaaagataatgttaatcctttgttgaagatttatgttaaaatataaggtagcttgattttgcttttagaaactctcggtttttaactatataaatagaatcttaaaggaaggaggagccagacatgcaaacagagactattcacaatattccttatgttaacagtaacttaacatcatttatcgattacctagagaaacattatattgatcaaaagattggtgctgtcatttccacagtcaaccctgaaattgcatttgcagctattaaagatcgggactactttgatgtactatcttcttcaaacttcattttgcctgatgggatcggtgtagtcatgatgtcacgtttgactaacaacaggcttcagtcccgaatcgcaggttacgatgtttttaaagaacttctgggcgttgctaacaaaaagaaaaaacgcatatttctgtacggtgcgaagaaagatgttataaaaggtgttgtatccaaaatttcttctgaatacccaaacattaaaatcgcaggttattcagacggttatgttcaagatcgcaccctagtggcaaaacaaattgcaagagcaaatcctgacatggtattcgtagctttagggtatcctcatcaagagaaattcattcataactacagacacttgttccctaaagccgtatctataggtctaggaggaagctttgatgtatttagcggtaatgtcaaacgggccccttcctggatgatacgtttaaatttagaatggttctaccggttaatcttgaatccatggcgatggaaaagaatgcttagcatcccaaaatatgctttaacggttttaaaagaagaaaaaaacaaaaaaactttctatccaaagcctgaaaaagatcatacaaaacagatttaaaaacgaaaactttcaaataaatggatgataaaaatgaaaataagatcactactggcgaattgctatttgtattttttatcagcaatcgccttttttctgcaatgggtgaaacctgaaagcaaagtgaccctcctgatctcattcgaagcaaacgcaaaagcgattcttgaggaatatgaacaaggacaatactcttataaacttaacatcctgtatacccagcaggcctctgctattgccgagagcttcccgaatgtagatgcatatttattacaagaaaaaaaccctatccatctcattaaagctgtatacctaatgtttaacagtaaagtgatcataacagataattactttctattaacaagtgtgttaaataagcggaagcaaacgaaatgtatccaagtatggcacgcaaatggctcactcaaaaaatttggtttggaagacattacaaacatgcaacggacgaaaactgatattaaaaggttccaaaaagtatacagttcgtatgattatttaactgttggctcagaagagatggcaaatatcttcaagaaatcatttggaataaaggataaccaattattaaaaataggtgtacctttaacagacccttattaccgagaaaacaagaaaaaaatttcagatactctaaacatacaaagaaaaaaaataatcctctatgcaccgacgtttagagattataatatgcaatcaattcaattgccttttacagaagaacaattaattcatcagttaaaagaagaatatgttttatttgttaagctgcatcccgccattcagaacaatattgatattaaatattccagtgattatattaaagatgtttctaattatgccttgtttgatctactcatggctgcagacatattaatcactgactattcttctgttccctttgaattttcgattttaaataaacccattcttttttatacttatgatttaaaactttatcaacagaagcggggattggttgataattatctttccataatacctggaagagcctgctatgacagtgaatcattaataaatgaaattcaaaccccatttaattattccaaaataaaagttttttccgatagatggaataagtattctgatgggaattcaagccaaaatttattgaatttcatcgaaaatttaataagctaaatgatgacacttgttcaaaacagaacaagtgttcttttttctcttgactaccgaacgtatgtttgctttaatgtaattagttgcttatggcagcaaataataatagaggtggtaaatttatgagaaaaaaagaactgtttgatttcaccaacatcacaccaaaattatttactgaactacgtgtagcagacaaaaccgtacttcaatcattcaatttcgatgagaaaaaccaccaaatttatacaacccaagtcgcaagtggattaggaaaagacaacacccaaagctatcgcataactcgtctatctcttgaaggtttacaattagacagcatgctgttgaaacatggaggtcatggtacaaatattggaattgaaaatcttaatggcaccatttatatttggtctctatacgataaaccaaacgaaacagataaaagtgaattagtttgtttcccatataaagcaggcgcgactttagatgaaaattctaaagaacttcagcgattctcgaatatgcctttcgatcatagggttacacctgctcttgatatgaagaatagacagttggcaattagacaatacgatacaaaaaataataataataaacagtgggtgacaatctttaacctggacgatgcaatagcaaataaaaacaatcctctttatactattaacattcctgacgaacttcattatttacaaggtttctttttagatgacggttatttatattggtatacaggagatacaaacagcaaaagctatccgaatctcataactgtatttgattccgataataaaatagtgctgcaaaaagaaattactgttggcaaagacttgtccaccagatatgagaataacttccgtgaaccggaagggatctgtatgtacaccaatcctgaaactggggcaaaatcattaatggtgggaattacaagtggaaaagaaggaaatcgtataagcagaatttatgcataccattcttatgaaaacttcatgaatcatgtacctatgcttcgatcccctttattaaaaaccgtggggcaccaagatacacctccagaaagatttcaaccatttatgcaaaccttcattttagagtataatgctcaaaacaaaaaatggatggttccgacttcaggttatttaccatcttacacatcaaatttagtccgaaatattactatcaatgcagatggaaacttgcaagtcacattaaatgaacgctatattagtttactgcatcaatcgatagaaggagatttccgcttaaaacaaaaggatatccgaatgggatcctggtattttgctggcggagaaaaatcaaatgtgcttgaaataggttttatgaaagggagtacaaaaatcagacccgatgatgcagccatctcaaatgcttcaagaatgagtatttttatgattgttgcggacaagattgaggtgtgataaacaaataggctgtagctattaaatagctacagcctatttgcaactttctaagttttttatcgatattccggaacatcaaaataaagtgtatagccgtccagcaatgaatacaggctgtacatgcggtttacttgtttgtacgcccagccgatgtctgttgcgtattgatgtgtcgctgtagctgaccatctcattttgtacagtgtgtcctgattgtaagctgtgttgtggatatacgatgagcctatgaatttagctccgccgataatggccgcttcaggtgtgaaccagccctgctcgtacgcatatttggctccgtagtaattcggattgctgtcgtatgctccaattccatacatgttgtatacggtttttccgttataggttaatccattggctaaggcggatgtcccgtttcctgtttcaagaagagcgtgtgagattaaatacagttcgttgatgctatattgattggcggcatcgataaatgcctttgctctccctgtcaggatgcctttacccgcaagcactttctgattgacctcagtaacgctgaggcccgctgtctgtgacagcttgagaaattggaagtagtatttgctgtctctggtaaagttatttggatccacgtattgaactacttcatcactgcttgcgtttcgccagcccaaattgatcttagcccagccgtttatctgtccgatgattttcactttatcgccttttttaaattggccgatcacgtttgtcgggctgacttccggcgttgaccggatatttagtacatcagccgtaacggttgatgttgctatattaatgtacgtgagcgatacgtaagccgctccgtctgtttgcggacttactgtcatttgtttttggaccatatcacgaagcgagagattgtaatttgttttcatgatttgcgggccgtttttgatcttcacgatagatgatgtccatccgtataattgttttagcttcgttgatgccgcagcagctgtatcattgcctgtgaactgctcatttacgctgattttataaagcgtattgcttttcgttgtgtagctgggggttacacttttcgatttaagataggttaacccattattcaatgctgttttgctgctgagctgtgttgtcacgattttgtattgtgtatatgctgtctggcctgtttttgatgttgtgactgcgatatgattttgtttgaaaaatgttaaaacgcggtcaatctcttcttggctgataatagcttcagttgtgatttgatagctgctcgcagctgtctgaccggttttctggcttgctgctgatatatgattcgatttgaaaaacgtgagtgcctgattgactttcgtttgatcaagcagagattcggttgtgattttaaacgtgccagctatttgttttttgacggatttcgcagaagcactcagctgatttttctttaatatgttcaagccctttgtgacttttgcttgatctgatgtttcttctgagatgagctgatattgattttctgctgttgatccagctgctgtttttgcagcttttacttttttctgagcaaagaaggctgctgctttgtttgcttgctgctcgcctaaaatctttgccgtcgtgatttgataagctgcagacgttgtcgtttttttgacgctggatgacgtgtaatgccattttttctttttaaagaaagtgtctattttttggagctgctgttttgttatacccttcatattcacggtatatgatgtgctttttccaacctgttgataactcccggatacgccagtgtttttcttgatttggctgatggcgtcctttactgtactcagccctttgaaataagctgattggacattgtatgactcaacggttgttttttgattgatggacttgtagctgcctgtgatgccagtgctctgtttcagctgctgcaatagagttttggcattggcttcacctgaaatggcggcagttgtaaacgtataataggcttgccctttcactgtttcctttaatgatgcctgcagcccagattccttttggaaggcgtttttgatctgcgctgctctgctgtctcccacgattgtgccagactgaatggttgtgacagacaccgtgtgtgtgatgggctgatacgagcttttaatccccgtttgcttggccaggctctggataagcgccttgacttttgtctcatcagcaatgtctgatgtcatgacgttcatatagggctgagctgctccgtaagcttttacagcgccagccactcccgtctcctgtttcagctttgctaggatagtgttggcctgtttttctccggagatggcacctgacgagatggtgacatatggctgtttgcttccaacaggacttgacgttcctgtaatcgatgtctgtttggcgagtccgctcagtattgctttcgcttctgattcgctatgaatgcctgaggcggaaatttggtaggtcgttgttgtgcctgaagcctgataggatgcatcccagccagtatctttttccagtttggcgacagcttgtgaggcttggctttctgtactgaacgtattcgacggctctactttatatagtgagtagtcggtatacgcggctgcctgggcagaaccagacatggcaaaaaaggcaagggacgcggcggatagaagcataggtgcgattagtctctttttcattccttctcctctttcttattctatgagtatataaaactagtttatttatcggcacgcggttgcttcatttataggtgaatcacttccattttctaataaaaaaaaaacttaatctcgaagtgagattaagtctaaatatgagacacgataagggtacaaggtccttttatcgtaaaatcgggcatttgagccggcaaaataaagtgatcgccttttttgagcggacatgttttgtcctcatacatgagcaaaccgcttccttctatcacgctgcaaatcagaaaggattcatcctgagccatttcagcttcgccattgatgtcccatttataaaccgaaaaatattccccttggacaaatgttttaatggttattccttttctagattctgtcgattcatctatatacccgtccacatggggaaccgtggccgcattgaccgctttcgcaaaatgaagctctctcggacttccgttgctatcaagacggtcataatcgtacacccggtatgtggcatctgaattttgctgagtctctaaaacaagggcccccttgcacaatgcatgcagcgttccgctcggcacataataaaaatcacccggtttaattttgattcttcgcagcaggccctcccagtcaccgctgttgatcattgtgacaagttcggtttttgagcgggccgtatgcccgtaaatgatttctgcgttttccttacagtcgataatgtaccagcattccgtcttgccgagttctccctcttcgttttctccggcatagtaatcatcagggtgaactttaattgacgtatcttccttcacatccagcagctttgtcagaagcgggaaccgatccccctctacgccgccgaatacttcacggtgttcttcccaaagctcgatcaatgtctttcctttatacgggccatttgcaacagtgctcggtccttttggatgagcggaaatggcccagcattcccccgttgattctgaaggaatactgtatccaaatctatctcgtaaagcggttccgccccagattttttctttaaacacaggcgttagaaaaatcggtgattgcgtcatgatccgtacccctcccctgtaaataactgatcatcattttcccggtgcgcccctcttacaaacgcccgtataagctgtcttttttccgatgacaacatatgtacaaagcatcatcttttcattaccccttcaaagaaaacgcttcctatctattatatcacgtcgaaaagaagctttgtttcagccttttcctcgataagaataattctccttttttgatacaaattaataaaaaccgtcaatctgtttacgaaggagagaaactatgcaaatcgactctgatctccagaacaatttagacaaactgaaaaaaacattgggacaaaacgacgatatgatgttttatacatttgctttcggagatagcagacaaaaggcgtgtttactgtatattgacggtctgacagagaataaaatgctggcgcaatacgtcatttctcctttacaaaaagaggcgttagcccataaggaatgctcgattgaagacttatccgccttttttttcggctttcaccacagcgttgtttctacaatgaaagaaatagagcagctcgttttttcagggcaagccattttgctcgctgatggctatcgcggaggattagctttcgacaccaagtcagtcgcaacacgcagtcttgatgaaccctcctccgaagtcgtggaacgcggccctaaaataggatttattgaaaaactgcggacaaacacggcgcttttgcgtgaacggacgagtgatcctaatctcgtcatcaaagaaatgacactcggaaaaaggaccaaaaagaaaatcgctgtcgcttatattcaggatatcgccccagattatgtcgtcaaagaagtgtttaaaaggctgaaatcagtcaatatagataatttgccggaatcggggacgcttgaacagctgattgaagacgaaccattttcaattttccccacaatattaagcacagaacgaccggaccgggtcgaaagttctctattagaagggcgagtgtccatattagtggatggtacgccgtttgctttgattgtaccggctacggttgacgaatttattcattcgcccgatgattacagccagcgctggatcccaatgtcacttgtacgccttcttcgttattccagcatcctgatcaccatttatttgcccggtctgtatatttctctcgtttcttttcacaccgggctattgccgactagaatggccatttccattgcaggcagcaggcttaacgtaccattcccgccttttgtagaggcctttatcatgatctttacgatcgaattgattcgagaagccggattaagattgcctaagccgattggacagacaattggccttatcggcggcgttgtcatcggacaggcagctgttcaggcgcaaattgtcagtgcgcttatggtcattgtcgtttctgtcacagcactggcatcctttaccgttccttcatacgcctataactttccgctgcggatcattcggatcggggttatgataagtgcaacagcgcttggcatgtatggcgttataatggtttatctgtttgtgatcggccatctcatgcgcctgaaaagctttggacaggattacattatcccgatcatggcgcagcctggacaggatttgaaagacacagtcatccgtattcccacgatgtttttaaaaagaagaccgacacgaaacgatcccgaagataacatcagacaaaggtgatggctatgaggaaatcagagcataaactgacatttatgcagacgctcattatgatcagcagcacattgattggtgccggggtgctgacccttccccgctcagccgccgaaaccggcagtccgagcggatggctaatgatactgctccagggcgttatttttattatcatcgctctgctttttttgccttttcttcaaaaaaacagcggaaaaactctttttaagctcaacagcattgtagctggaacattcatcggctttctattgaatttatatatctgtctatatttcattgggattgtttgctttcaagctcggattttgggagaggttgtcggattctttttgttgaaaaatacgccaatggcagttgtggtgtttatatttcttgcagttgccatctatcatgtaggcggaggcgtttattcaattgcaaaagtatacgcttatatttttcctataacccttattatttttatgatgcttctgatgttcagctttcgcttgttccagcttgattttatccggccggtatttgaaggaggctatcaaagctttttctctttattcccaaaaacattattatatttctccggatttgaaatcattttttacctggtcccctttatgagagatccaaagcaagtgaaaaaggctgttgctctgggcatcgcgacttccacattgttctacagcattactttgctcattgtgattggctgtatgactgtggctgaggcaaaaacggtgacatggccgaccatttcccttattcacgcattagaggttccgggtatttttattgaacgatttgatttgttcttacagctgacctggacagtccagcaatttgcctgtatgctcggatcctttaaaggcgcccatatcgggttaacggaaatctttcatctgaaaaataaaaacaatgcatggctgctgactgcaatgctggctgcgacgtttttcataacgatgtatcccaaggacttgaatgacgtgttttattacgggacgcttcttggatatgctttcttaattgtgattacaattccattcttcgtctggtttttaagctggatacagaaaaaattagggagggggcagctacaatgaaaacagcaacaaaattctccgtcatgttttttatgctgctggtcctctgcgggtgctgggatgtcaaagatatcgagcaactatccttcgccagagggctggcgatcgatgagacagatgatcaccagtacaaactgacgtatcaaaaccttcttccccaaagcgaagacagccaagcatccggaaaacccgaatttgtcaatgtgacgtcccacgggaaaacgattctggaagcagtcagtgatgtatccatcaaggaccctcctgtttatagcgatcatttaaaagtcattcttctgggagaaaaactgatgaggaatcaaaatgtagaccaagtcctcaaccactttatccgagatgatgagctgcggcgaagcagctatttgatggcagccagagggaatgcagctgatgttctcacaaaaggaaaccccaatcagcagcagccgatgccctccgaaaaactgattgatttgacaactcacagcggatataacggtaagattatgataccgctgcgcatcggaagagcttctgtctactctcagaacgggtacagttatcttattcaagccgtgaaaaacgaaaagggaaaagccaagtatgacggagcaggcattatcaaaaggggcagcaataaactcgttgggtttctttcagctgatgaaacccaaacactgtcatgggtcatggggacgatccaaggcggtgtcatgccgacgacagataaaggacatccgattacgtttgaaatcaaaaagtcgaaaaccaaaattaagcctatcattgaaaacggaaagcctatctttcatatttctgttaaaacgaagggcatcctgacagaagaccaaaacccgaatgaaaactcctttagcaaaagttatttgcacaggctggaaaacatttttgaaaaaaagcttgaacgagatgtaaagcaggtaatggataaactgcagcacgagtataaaaccgatccggtctttttatcagaccacataaggattcaacaccctgactactggaataaagtaaaagggcattgggatgaaatattttctgagactgattttaagtacgatatttcttttaaaatcattaactttggcacggtgggaaagtaagcaatcaaaagggtgcgcatgatcgcgcacccttttttatgttccgacagtctgctgttttccggccgatcctccctgtccgtttttgtcccgtaaatcctgctcaatttcttcaaggctttttccctttgtctctgtcactttaaatcggacaaataagaacgccatgataccgatcgcggcataaatcaggaataaataactgattccgatcgcttccattaatattggataggttaatgaaacaatcagtgtcccaacgtgcaacattaaggtcgaaacaccggtcccgattcctctgacgtgaagcgggaacaattcaggaagcatcacccacacaaccggtccccagctgaccgcaaagacaacgataaacacgcctaaacaaatgacggtcgtccatgaggcagccggagtgttatcgaaaaagagatttactaaagcgagaacgatcaagctgatcaccatgcccgcattcccgaatagcagtaacggctttcttccaatcttgtcgataattttaatcgctactaatgtcatgagaacattgactgtgccgattccgaccgtgcctaaaatcgaagcggagtttccgaatccgacgtttgtaaaggtctttggcgcatagtagatgatcgtattcgttccgataaattgctgcaaaaaagcgagtcccaaacctgcaataagcgctgggcgcacccatggatcgaacagctccttcaggccgccttcatcctgcttttccgcttcttttatatcatgtatttcctgatcaatatcttttgtgccacgcaatttttcaagaatgttcttcgctttgctttcttcgccattcgtgaacagccagcgcgggctctccggcataaacaaaatgccaataagcaagagcaatgacggcacagcagccaatccaagcatccagcgccacgcttcggcatcggcaaatatgtaattgacaatgtaagaaagaaggatgccgaccgtgatcatcagctgattcagtgatgacagcgccccgcgtttatgttttggcgccagttcagataaataaaggggcacgattgtcgtcgatgttccgactgcaagtcccaaaatgatgcgaaacagcaccatgactcctgtatttggggccagtgccacaccaagaccgcctatacaaaacagcagcgcggctgccataattgctttttttcttccgaaacggtcagtcagcttgccggccgctcctgagcccaatatcgccccaaccagcaaggagctgacaacaagaccttctgtaaacgcgtttaagcctaactcctttttcataaataaaatagctccggaaatcactccggtatcatagccatataacgcgcctccaagagctccgaaaaaataaagccatatatttgactgctttttcataaagatgactccctttctccatcagctgcaatgacattgtctgtgggatttttttagaaatcttttagcctctttttccggccattaaacctttttattttgctgatcataagttttccaatcatttacttgtatttttttcaatgtcgccgaaacattttacctgctgcggcgtccaatataaggtgattcagtacatcatcgttatcaattttcaaaaacaagaacttataaatataggaatatttatcgaaaaatgtctttcgagtagttgccccatggcaaatagaatggtacgcttcaaatattaaagaaacgtgaggtattgatatatggaagaacgatcacagcgcagaaagaaaaaaagaaaactaaaaaaatgggtgaaagttgttgccggattaatggcttttttaatcattgcggcaggctctgtcggcgcctatgcttttgtaaagctgaacaatgcttctaaggaagctcacgtcagccttgcacgcggagaacaatctgtaaaacggatcaaagaatttgatcctggaaaagattctttttctgtattgctcttaggaattgatgccagggagaaaaacggcgagaccgtcgatcaggcaagaagtgacgcgaatgtgctggttacatttaatcggaaagaaaaaacagctaaaatgctgagcattccgcgtgacgcctatgtaaacatcccaggccacgggtatgataaattcacacatgctcacgcttacggcggcgttgacttaactgtgaaaacagttgaagaaatgctggatattccagtcgattatgtcgtagaaagcaatttcacggcttttgaagacgtcgtaaacgagttaaatggcgtcaaagtaactgtaaaaagcgataaagtcattcagcaaatcaaaaaagatacaaaaggtaaagtcgttcttcaaaaaggaacacatacgcttgatggggaagaagcgctcgcttacgtaagaacacgtaaagcggacagtgaccttttacggggacaaagacaaatggaagtgctgagcgccattatagataaatcaaaatcattaagctcaattccggcttatgatgatattgtggatacgatggggcaaaatttaaaaatgaacttatcccttaaagatgccatcggcctgttcccgttcatcacttcattgaaatcagttgagtctattcagctgacgggttatgattatgaacctgccggagtctattatttcaaattgaatcagcaaaagctgcaggaagttaaaaaagagctgcaaaacgatttaggtgtataatgaacgggatggcgattacgccatcccgttttacatatttccttgttgaaaattatcaaagtaacgtttagccttaatttatatggattatgtttcacaggcaagctgaacatactacacgaagcagcttcatttttaaggaggttcccctacatatgaaatgtattgcgattgatctagacggaacattactgaataaagaaagcgtcatttctgcggaaaacagagaggcgatcaagcgggccgttgatgccggcatcctcgtcaccatttgcacgggaagagcgacatttgatgtaaaagcgctgctggatgacttggacatccctatcattgcagctaatggcggtacgatccacgacacgggttaccgtttgatcagccggacattaatggatcaggaagccggtaaagcgattgctgattacttactttcaaaaaacatttactttgaggtatatacagatgaccatctgctttctccttttgacggcgaagctaagctgcacgcggagcttgacattctaaagagcgcaaacccaaacgagcagacggatgaattgtggcagggagccatgactcaattcaaacagtttggcattaaaccaatccctcatatcgaatcggtttttgacggcggtgaaaacatttataagcttctttgcttctcctttgatatggacaagctgaaacaagcgaaggaagaactgaagcatcataaaaaactggcgcaaacctcttcaggaaaacatattatcgaaatcctgccggcctcgtcaggaaaaggacgcgcgttaacaaagctggctgacctatacggaattgaaacacaggatatctatgcgatcggcgatagtccaaacgatttgtccatgtttgaagtcgccggacaccgaatcgccatggaaaatgcgattgatgaattaaaagaaaaaagcacctttgtcacaaaaagcaatgacgaaaatggtgtggcctactttatagaccagcttctttcaggacaatatgcataaagaaaagactccagagattggagtctttttcttttattgcacccgtatacttcctgcgtatttatccttccaatatgtgctcgtgttcatattggtgatggtcacgccgtttgataatgtaacgtgaacaacttgtccgtttccgatatagatggagggatttaagcttgttgattgaaagaacacaatgtctcccggcttcaggtccgccttctcaatcttagttccggcattgtactggcttattgcgtatcgaggcagggaaataccggctgctttctggtagacatattggacaaatccagctgtatcaaatcctgtctcaggtgttactccgccctgtttgtaaggcacttctccgacataaagcgtcgcttcggaaacaatcggattttctttcgggattgtcaggttgtcaaatcggcgaatacccgtcatcttcgatttccagtaatcctctgacaaataggaaatggttactttttctgaccggcttgcctgaatgaacctgcctgcgcccgcataaatgcctgcatgtgaaattcccgttttatacgtattgctgaaatagacgacatcaccaggctttatgttctgaggggctaccttctcgcccactgcccactgctgttcggctgatcgcggcagataaatgccgagtgcctgttgaaacacatattgcacaagccccgagcaatcaaagccctctgacggcgtgcttccgccaaacacatatgggacaccgatatatttttcggcctcctgaacgacaggaacatcagccgttgccggatcggcagcgattcgtctcgccccgatataagttccgctccaatagctgctttttttgtaattggtgatgataaccccttttgactgtgtactgtgaaccatttggccgtctccgatataaagggcgtcatgtgtcggaacagtgccggtgcttccctctttcttgaaaaacaaaatatcacccggcttcaggttttccggctttacagctgttccgattttatactggtcgtttacagatctcggcagatgaatatcagccttactgaacacatattgtatcaatcctgatggatcgaaaccctcttttggcgtttccccgccatatttatactgatatccaagcaggttttttgcttcactgacaatcaattctgatgatgtatcagcttccgcaatctccgcttttgtcataattggaaccaaaaaacaaatgataaccgccacaagcaaaaacttcttccagtttgccagtgtgttcacttttattatctcctcctctttttgcagttttaacatcggtatttttttgaatatgttaagagactttttaatatttttacagaatgaatatgctgggcaaataaaaagagagtgtctcctcagacactctcttttttgaattatttattggcgtttaccggttcttcctgctgctggattttattcatttccatatcaatcttctgtttttcctgatctgtcagctgatcattgaatttaaaagctgacataaacatgaacacgatggctacggcaacaaacggccagatggctttgacaaatttcatctttatcactccgtttatttagattttagtttgtcactatgatcaatatcaaacgtcagttttccgtcttctactttccaagcgaaattagagtctttcgtcagttcgcgaataatggttttctgtttaaggctgtcttttttcacaggtgcaggtgtcgcttcatggatatcgatcggtgtcacttcaaagcggcctgttccatttttcttcaggtgatactgaaccagtgcactgtctcttgttctcgtccagccttggtcaaagacaaagttgccgaggctgtagaaaatgacggttccgttatatacttcaatcggttctaagacgtgcggatgatggccgacgatgatgtcagctcccgcatcagacatggctcttgcaagctggcgctggcggtcgtttggatcattgtcatactcttggccccagtgtgactgcacaacaacgatgtccgcatgttttttcgcttctgaaatcatagggatgaagatttcaggatctgcgggcagcacgcccggcgtattctttttagccgcgaaacctttcccggacacatcggtaaagccaagcgttgcaattgttaccccgttgactttctggtacgaaattttctttttcgcatcacttaagctgtatcccgctccaacgatatcaaggttttgcttcgcaaattctccaagcgtatctttcatgccctgaacgccgtaatccattgcgtggttgtttgcgctgttgagaactgtgaaattcatgtccttcaagactttcactgattccttattcgtctgcagatgaatctctttatctgcttgtttataattcttttgataggttaccgggttttcaaagtttcctgctacataatccgaagctctaaagatcggttcaacatattgaaaaatactgtctgcccctttttgctccgttactttttcaacatagcgtcccatcataatatcgcctacaaatgaggctgaaagtacgtcgtcagaatacgttttgaccttcggcgtttccgcttttcccgcccacatgaaagcgaacataaggacaaaaacgatcggaatggcaataaatacgtgcttattggttttctttttttgctgttttgtcagctttagcagcttttcatgaaagctcagttcttttttcatcgtttgacacaccttacattaaattaagtagtaaacaaacatgatagcaaaggtcgctccgctcaatagcagcgtgcttccgaacgtaatggttaaaccttgtttctgaatggtattggcaattaaacctggcacgatgatgccgattcctcgaaattctgcgatttcaaatggtacaatcgggtatagaaaatcaaacgcgatttttaggacgatccctgttatcagcatggcagcgaattttctgcgtccgtacaaaatcataaatttggataaaccgtatttcacgataacataagtgagcaagctcactagcaaaacaagtaaaataaagaccggctgattaaacacaagtcctaaatatcccggtacaacaagtcctgccggcacgatccctgttttttccgcaaaaattaaactgagtagtacacctaaaattagtgcgatgtataaatctgatccgaacatgtttgcatttccccctagcttacgagctgcttaaccttgtattcgtggattttttcaattaaaggctctgcggcaccatgaatattgccgacgccatatatgacacggttgtgcattcttttctttaacaattccataatttcatctgttgacttatactctagatcatgcagtttgtctgcaggaattttgccttcttcgtaggcttttacgaccggttctgttgtttcaccgattaagatcagttcacttgcttcaatataaggcaatacgtcatttgcgaattgctgtgtccgatcgacacggtctgcgcggcagttcatgatgatgatcggatcatcggtcgggtaaccgatttcttttacacgtttccatatattcaaagtagaagaagcgtcgtttgcggcaaacccattaacaaagtgcccaggctcgctcggactgatcagcggaagaattctcattgctcccggatctggcggcgcattcagcattcccttaaatgctgtttcttcgtcaatgccgagtgcttgagccacacccagcgccagagaagcgttatcagggaataccatgtattcaaatttacgtaaatactcatctgtaatttttgagttatcagcaatgatgacttttgtgtttcgttcttttgctttttgtttaaagaactcggtatattcactatctgtaatgacaagatggccattataaggaattgtagcagtaaacgcttctgcaatttcatcaagcgtcggccccatgacatccatatggtcttccaaaacattcacaatgacgccgatattggcctgcagaagttcttcctgaaagatgatttgataatctgggttaacagccatgcattcactgacaatcgcgttagcccctctttctactgtttctctcatgacttctttttgctctccgatattcggcccctgaggtttccgtttaatcggcttttcctccggtgtgtcccagtaaatcattcttgcatctgttcctgttgtttttccaacagtcttgtaaccggcttctattaatattccggttgtcagccttgtcacagtcgattttccgcggatgccgttaatattcacccgaacagggagggcatcaatgtttttctgatgtcgtcgtttttctaatattccgatgaccagtatgacagcacaggctataatgagtaaccacattgcttttcgacatctccttctatattgttgtaaattcattcatcagtatatagaatcactatgaattctcaatcggcattatgtaacataatcttccctaatcgactaagccaaacttctcttttgaaagagattttatacctacaaactgttttctatttttggaaaacagcaggacttataccttatcacttttttaaaaaattgaagagaatgcgctttcatttttctcctgatatccttctggacgtatagtcacaccctgctgtttgtatttaatatgcatttcaaatcaatctttttttcagcctgtgttatcaagcatttcctgctatcatgcgtgtttccggttcttatgaacacaaaataattttatcctgtttcttaaggacaaggtcataatgtcatcctttctgcatggaataagcaatatgaggcccattccaaaatgactaaggaggttcgagatgaaaacgctaaacatacgagtccgaattctctaacataattaaacattttctgggatgatagtcttttctgtttctcaccatttacaggtctaaacgcatgactttgaaacaattttaataaaacttaatatttgttcaagaaatcttcatccatatttgtgaagactttgtcaaaaaaagagtgaaaaccttaaatttttcaattatatatacaatttacaagtagatttcttttgatatttttattgctaacttcggattgttcatgataatctatatatgtaaacggttacataaacaaggaggagctgttttggctacaattaaagatgtcgccggagcggcgggcgtttcagttgcgacggtttcccgcgtcctgaatgataatggctatgtacacgaagaaacgcgaacgcgtgtcatagcggcgatggcgaagctgaactattacccgaatgaagtcgccagatctctatataaaagagaatcccgactgatcggacttttgctcccggatatcacaaaccctttcttcccccagcttgcccgcggtgcggaggatgaattgaaccgggaaggctatcgtcttattttcggcaacagtgacgaggaattgaaaaaagaacttgaataccttcaaacctttaagcaaaatcatgtcgcaggcattattgccgcaacaaattacccggatctcgaggaatacagcggcatgaattatccagttgtttttctggacagaacactggaaggggctccttctgtgtccagtgacggctatacaggaggaaagttagccgcccaggctatcattcacggaaaaagccagcgcattacgctcttgagaggacccgctcacctgccgaccgctcaagaccgctttaacggcgctttggaaatcttaaagcaggctgaagttgattttcaggtcattgagacggcttcattttcaattaaagatgcacaatcaatggcgaaggagctgtttgccgcttatccagcgacagatggtgtgatcgcgagtaatgatattcaagccgctgccgttttacatgaagcattgcggcgcggaaaaaatgtgccggaggacattcaaattatcggctatgatgacattccgcaaagcggacttctgttcccgccactttctacaattaaacagcccgcatatgatatggggaaagaagctgccaaactgcttttgggtatcatcaaaaaacagccgctggcagaaacggcaattcaaatgcctgtcacctatataggaagaaagacgacaagaaaggaagattaagatgcgtaatatttgtgtgattggtagctgttctatggatttagtggtcacctcggacaaacgcccaaaagccggtgaaacggttcttggcacgtcatttcagactgtgccgggcggcaaaggagcaaatcaggccgttgccgcagccagacttggggcgcaagtgtttatggtcggcaaagttggagacgatcattatggaacagctattttgaataatctcaaagctaacggcgttcgcactgattatatggaaccggttacacatacggaaagcggaaccgctcatattgtgcttgctgaaggcgacaacagcattgtcgttgtcaaaggcgcgaacgatgacatcaccccagcgtatgcgttaaacgcgctcgaacagattgaaaaggtcgatatggtgctgattcagcaggaaatcccagaagaaacggttgatgaggtgtgcaaatactgccattctcacgatatcccgatcatactaaacccagcaccggcccgcccgctcaagcaggaaacaattgatcacgctacctatctgacgccgaatgaacacgaggcttcgattttattccctgatcttaccatttccgaagctctggcgctttatccggcaaagctctttattacggaaggaaaacaaggcgtccgctattcggctggcagcaaagaggtgctcatcccgtccttccctgtagaacccgttgatacaaccggagccggtgatacgtttaacgcagcatttgccgtggccctggctgagggaaaagacattgaagccgcattgcggtttgccaatcgtgccgcttccctttctgtctgctccttcggggcccaaggcggaatgccgacaagaaatgaagtagaggagctgctttcatgaaaaaacacggtatactgaacagccatcttgccaagattttagcagaccttggccacactgataaaattgtcatcgcggatgccggactgccggttcctgacggcgttttgaaaattgatctttcactgaagccgggtcttccggctttccaagatacagcggcagtgctcgctgatgagatggtcatcgaaaaagtcattgctgcagctgaaataaaagcatccaatcaggagaatgcgaaatttctagaaaatcttttctctgaacaagagattgaatacctttctcacgaggagtttaagctgctgacaaaagacgcaaaggcagtcataagaacaggagaatccacaccatatgccaactgcatcctgcaggcaggtgtacttttctagaaaggaggatgaaacatgcagattgaaatgaaagacattcataaagcattcggaaaaaatcaggtgctgtcaggcgtttcctttcagctcatgcctggcgaggttcacgcattaatgggagaaaacggcgccggcaagtccacgcttatgaacattttgacaggcctgcacaaatcggatcatggtcaaatcagcataaacggaaacgaaacgtatttttccaatccaaaagaagcggaacagcatggaatagcctttatccatcaggaactgaatatctggccggaaatgaccgttcttgagaatctatttatcggtaaggagatatcctccaagctgggcgttttacaaacaagaaaaatgaaagcgctagcaaaagaacaatttgacaaactctccgtctctctttctcttgatcaagaagccggcgaatgttccgtcggacagcagcaaatgatcgaaatcgcaaaagcgcttatgacaaatgccgaggtaatcattatggatgaaccgaccgcagcgttgactgaacgtgaaatcagcaagctctttgaggtcattacagcgttaaaaaagaacggcgtctccattgtctatatttcgcatcgcatggaagaaatttttgcgatttgcgacagaattaccatcatgcgtgacggaaaaacggtagatacaacaaacatctcagaaactgattttgatgaagtcgtcaaaaaaatggtcggacgggagctgactgaacgatatccaaaacgcactccttctctcggtgacaaagtattcgaggtgaaaaatgcctccgtaaaagggagttttgaggatgtcagcttttatgttcgttccggtgagatcgtcggtgtttcaggattaatgggagccggccggacagaaatgatgagagcgctgttcggcgttgacaggctggacacgggtgagatatggatcgctgggaaaaaaacggctattaagaacccgcaggaagccgtgaaaaaaggtctcggctttattacagagaatcgcaaggatgaagggcttctgctcgacacctcaatccgcgaaaatattgccctgcccaatctgtccagcttctcaccaaagggtctcattgatcataagcgggaggctgaatttgtcgatctgttaatcaaacgcctcactatcaaaacagcatcaccggaaacgcacgcacgccatttatcaggaggaaaccagcaaaaagtggtgatagccaagtggatcggcatcggaccgaaaatgcttatcttggatgagccaaccagaggtgtggatgttggcgccaaacgagagatttatacgctgatgaatgagctgaccgaacgcggcgtcgctatcatcatggtgtcatcagagctgcctgaaattctgggaatgagcgatcggattatcgttgtccatgaaggcagaatcagcggagaaatccatgcgcgagaagcaacacaagaacgaattatgacacttgccacgggagggcggtaatatgaaaacggaacaactgcaaacagaacaaaaacggattcacttcgacggagtcatgcaaaaactcggcccgtttcttggtttatttattctcgttatcattgtatctattttaaatcccagctttcttgaaccgctgaatattttaaacctgcttcgccaggtcgccattaacggattaatcgcgttcgggatgacctttgtcattttgacaggcggcattgatctttctgttggcgctattcttgccctgtccagtgctttagttgcggggatgattgtgtccggtgtcgatccggttctcgcgatcatccttggctgtatcattggtgccgtactaggcatgatcaacggattattgattactaaaggaaaaatggcgccctttatcgccacgcttgcgaccatgactgtgtttcgcggactgacgctagtgtatacagatggaaatccgattaccggacttggcacaaactacgcttttcagatgttcggacgcggttactttttaggcattcctgtaccggcaattacgatggttcttgcctttgtcatcctttgggtgcttcttcataaaacaccattcggacgccgaacgtacgctatcggcggcaacgaaaaagccgcgctcatttcaggcatcaaagtgacgcgcgtgaaagtgatgatctattctttagccgggcttttatccgctcttggaggtgccatattgacttcccgcctgcattcggcccagccgactgcgggagaatcgtacgaacttgatgctatcgcggcagtcgtcttaggagggacaagtctttctggcggccgcggacgcattgtcggcactttgatcggggtcctgatcatcggcacacttaataacgggcttaatctgcttggcgtttcatcattttaccagctggttgtcaaagggattgttatcttaattgcggtattattagaccgcaagaagtcagcttaggagggttttcacatgaaaaaggctgtatccgtcattttaacgttatcattatttttgttaactgcctgttcgcttgagcctccccaatgggcaaagccgtcaaactcggggaacaaaaaggaattcaccattggcttgtccgtctcaacacttaataatcctttttttgtctcattaaaaaagggtatcgaaaaagaagctaaaaaacggggaatgaaagtcatcattgttgatgcacaaaatgattcatcgaaacagacgagtgacgtggaagatttaattcagcaaggtgttgatgcattattaatcaacccgactgattcttcggcgatctcaacggcagtagaatctgcaaacgcagtcggtgtgcccgtcgtaacaatcgatcgatctgccgaacaaggaaaagttgaaaccctcgttgcttccgataatgtaaaaggcggtgaaatggccgcgacgtttattgccgacaaacttggaaaaggagcaaaggtggcagagcttgaaggcgtccccggcgcatctgccacacgggaacgcggctcaggattccataacatcgcagaccaaaagctccaagttgtcacaaaacaatcagctgactttgaccgcacgaaaggcctgactgtcatggaaaacctgctgcagggacatcctgatatccaagctgtttttgctcacaacgatgaaatggcgctcggtgctctcgaggcaattaacagctcggggaaagacatattggtgatcggttttgacggcaataaagatgcgctcgcttccattaaaaacggaaagctgtcagccaccgtcgctcagcagcctgaattaatcggtaaattggctacagaagcagcagatgatattttgcacgggaaaaaagtgcaaaaaacaatatccgcgcctctcaaactagaaacacaaaaataattgtctgatgtttaggaacctgcgataacgtgaatagagatatagaatgaattatttctcttacgtgaggagaggaacggcatgaacaaaccaacaaaactattttcaacattagcacttgcggctggaatgactgcggcggctgctggcggcgctggcacgatccatgctcaacagccagaaacaacggtaagcattgatgatttatacagttatccgattgattcttatttggtatcagcagaggctctaaatgtcagaacgaaggcttccgcatcaagccaaaaagccgatacgctgcacttaggagatagcctaaagctgatttccttctcaaatgctgactgggcaaaggttcagtataaaaatggaaaaacaggatttgtatccactcattacattgttaaagcagcgacaacggtaaaaaccaaaacaaaaacaaaagtatatacatccgctgacggaaagagcattaagactcttccagcagacacaagcgtttcttttttaggctggagtaaaacgaataaaggcggttttgattttgattgggtattcgttgattacggcggtgcgacaggttatatgaaaacaaaggatttacacatgacaaaataactgagagggattccgcatttatgcggaatcccttttattatgaattgatttgtcacattcccaagatatttctcaggaaatattgtcgtatgctgtgtcgaaaccttacatgatcatcaacatttttgttcacgctaaaaagcggaggtgtaaatatggatcaatttgaagcagcatatgaatcgtataaagcccggcaaacaactgtcgatcaagaaaatgttccatctggaaaagaagaaattattgcggttagaagaaatgaggaagacaatattatcgcagtgaaaaccaatacaggaagagagctcgactatcctactgcgctgtcagaagcaaaatcaggaaaactcgctcatgttgatgtcttccataaatacgggcgtgacattttgcgaagtgaaccggacggcatcaaggaaaataatctgtctgagctgccggatttttaaacaaatacagccctgccgtatgttcgacagggctttcttttaaacaaaaggctgctgaatgtattcggctaaccgttttgcactgtgtgaaatatcctctgcagctgcataattcacgccatagaacacatatggaggcagatacttcatgccgatcagattactcgtggcctgaaatggtttcaatagctcactgatcgagtaatgatttgctccgcccgcttgatatttttccgcttcgctccctgttgatacagccagcatcagctccttgccatgcaaggcatttccttctgaaccaaaagcccagccataagtcagcacaagatcctgccattttttcaagagcggcggagagctgtaccaatatagcgggaattgaaagacaatccgatcgtattcctcgcacagctgctgttccttcgcaacatctatcgcttcatccgggtattccttataaagatcccgtactgtgatattgtcatgtttactcaattcctcagcccacgccttattaacaactgaggtctccatatgaggatgcactgccaaaaccaatattttcatcagaccacacctttactgttttgatgttattttatctaaaatcaggaaaagagccaaataaaaagaaagccctgctaaaaggggctttctttttttcttttattcagggcttccttcagttgtttcgatatctttcgcaaaatcagggttatccagattcgcattaaagaaatccgctgtgttcggaagtctgagattcatgttcattttttgagaaatcgtaaccgtgcaatcctcaagcacatagtcaaaaacgtgtccgcctgaattgcgtccttcgtcaatgaagtgcaggtgatagccagaaacggcgattccgtttgcataagctggtgtcaagaaacctacaatcgttcctctcacgttgtcgaagttgaaaatcggctgtgttttaaccgcttcaaccattggcacgtaaggtttttcttgaagttctactgttcttgtctgcacctttttaaacaatccgtcaatgcgaattgcataaaataagtttctgcttggcagcatgctgttgatctctttttcaaagtcttcgcgtgtcattttcgcatcaattttgtgcgtcatgtccggtgtaaagaacgtaaatgaacagaacggtgaacggtctccattttggaccggtgtcgcggttccgtctgagcgaagacggtaaaattcgccgtcaaacccaatcagctctccgtcaagcttgttaaaggttccgataccgaagtctccatatttcggaatctctgacagttcaaaatctccgtcatatactccgtctaatagagaagtcattgttgatacttgataaatctggctcacaggctgatctttttgaccacggctgagcacttgaatgttgctttctcgtttcatatttcccttcactccttttatttagtgctgttcataaaacagtgtcgtgatgcgcagagtgctagagagcttttgttttcataagttccccgaattctttcggaagcttgtcacttgctaaattaatgttatcactgtagtcaaccgggacatcgatgatgacaggaccttcagcgttcatgccttgacgcagaacatctgccagctggtctggtgattctacgcgcaagccagttgctccgaagctttccgcatatttcacgatatcgatatttccgaaatcgaccgcagatgtacggttatattttttcaattgctggaatgcaaccatgtcatatgtgctgtcgttccatacaatgtgtacaattggtgcttttagtcgaactgctgtctctaattccattgctgagaataagaaaccgccgtcaccagagacagaaaccactttttctcccggtttcaccaatgaagcgccgattgcccaaggaagcgcaacgccgagtgtttgcataccgttactgatcattaatgttaacggctcgtagctgcggaaataacgtgacatccaaatggcgtgcgaaccgatatcgcaagttactgtaacatgatcatcgactgcattacgcaactctttaacgatttcaagagggtgcgctctgtctgatttccaatctgcaggcacctgctcaccttcatgcatatattgttttaaatcagaaaggattttctgctcacgctctgcaaattctactttcacagcatcgtgttcgatatgattgatcgtggacggaatgtcaccgatcaattcaagatcaggctggtaagcatgatcaatgtcagcgataatctcgtctaaatggataattgtccggtctccattgacattccagaatttcggatcatattcaatcgggtcatagccgatcgtcagaacaacatctgcctgctctagcagtaaatcgccaggctggttgcggaacaaaccgatacggccaaaatactgatcctctaaatctctagaaagggtaccggcagcttgatatgtttcaacaaatggaagctgaacctttttcaaaagcttgcgaaccgctttaattgcttccggtcttccgcctttcatgccgaccaaaacgacaggaagttttgctgtttggatttttgctatggccgcactgattgcatcatctgctgcaggaccgagttttggcgctgcaacagcacgcacgtttttcgtatttgtgacttcattcacaacatcttgcggaaagctcacaaaagcggccccagcctgccctgctgacgctattctaaatgcatttgtaacagcttccggtatattttttacatcttgaacttctacactgtattttgtaatcggctggaatagcgccgcattatccaaagattgatgtgtccgttttaaacgatctgcacggatcacgtttccagcaagcgcaacgacagggtctccttcagtgttcgctgtcagcagacctgttgccaagttagaggcacccggtcctgatgtgactaacacgactcccggttttccagttaaacggccgactgcttgggccatgaatgctgcgttttgttcgtgccgggcaacgataatttcaggtcctttatcttgtaaagcgtcaaataccgcatcaatttttgcacctggaatgccaaatacatgtgtgacaccttgctccactaagcaatcaacaacaagctccgcccctctgtttttcacaagggatttttgttcttttgttgcttttgtcaacaccctcactccttattatgcattttaaacgtaaaattttaaatatcttgtgataagtttcactatacactctttggaaattgacctccaatatcgattcgccttatgattaatatgtaatacgaattattaacctatggaaaggaatgcatattgaatggagcttcgccatcttcaatactttatcgcagtagccgaagagcttcatttcggaaaggctgcccggcggctgaacatgacgcagcctcctctcagccagcagatcaaacagctggaggaagaagtcggagttacgcttctgaaaaggacaaaacgatttgtcgagcttaccgcagcaggagaaatctttttaaatcattgccgcatggcattgatgcaaatcggacaaggaattgaactggcacagcggacggcccgcggcgagcaaggccttctcgtaatcggttttgtcggatcagctacatatgaatttctgccgccgattgtccgggaatatcgtaaaaaattcccatctgtgaaaatagaactgcgtgaaatatcctcgtctaggcagcaggaggagctactaaagggcaacattgatattggtatacttcatcctcccttacagcatacagctttacatatcgaaaccgcccaaagcagcccttgtgttttagctttgcctaagcaacacccattgacttctaaggaatcaattacgattgaggatttaagagatgaaccaattattactgttgctaaagaagcatggcctactctatacatggattttattcagttctgtgaacaagcgggcttcagacccaacattgtccaggaagccacagaatatcaaatggtgattggtttagtcagtgccggaattggtatgacatttgttccttcctcagccaaaaaattatttaatttggatgttacttatcgaaaaatggaccaaatacagcttaatgcagaatgggttatcgcttaccgcaaagacaatcataatccgcttataaagcattttattcatatttcaaattgtcagcagacaagaactaaagagagtgatgcaggtacatgaacaatacttgcaatctcttttttcttttgggattcttatggaatttttattaatttaatataatcgcttagtacaactttatatcagtatacgtatacatacagtacaaatagttggcaaggacatcagtaagcgcaggacattagtttgattttaaaaatgaaagatagagaggtgaagtaaattattgagttcaccggcatattcacattgctcgcttttttcgtaacaatgatttttattttctggagaccaaaaggactaaatgaagctatccccgccacatttggcgctttaatggttttattgtgcggaagtgtgtcattggcagacttaggggaaatcggaacaaaagtcacgggtgcatcggttacaatccttgccactatgattatggccattgcactagaaagctttggtttcttttattgggtggctgcaaaactgctccaacaatccaagggttcaggcatcaagcttttttggctaaccaatttgctctgctttctcatgaccattttcctgaataatgatgggagcattttgatcacaactccaatccttttgcttgtactaaaatatttaggtttaaaaaaacatcaaaaagccccatatttattaagcggtgttttaatagccacagcctctagcgcaccgattggcgtaagtaatattgttaatttaatttctctcaaaatcattggaatggatctatatcttcacaccgccatgatgtttgtccctagtatgatgggactcatttttatgacttgtctactgtttatgttcttttataaacgtcttcccaagaacctgccagatataccgggccattttcagtctctgcggcatagaaggtaccatcctcttcattcgccatcagctcctttaccagaacgaaatcaaacaaaaatcatgttgtttgtgcttgcatttgtttttctcgtcagaatgagtctatttgcagcatcatataccggtatttctgttcctctagtcgctgtcatcggatcttttatcctgttgagctggagatggatttatttcaaaacctccccaagagacttgttatataaatcgccttggcacatttttatattcgcttttactatgtatgtcttaatttatggtctgcataatattggattcacagagttacttgtgaattattttgaacctgtggtttctggaagcctcgcccatgcaactttcgcatcaggtatctctacttcagttttttctaatctctttaacaaccatccagcgttaatgatcagtacttttaccttaactgaaatgaccctgaatccttcaacaacaaaaatcatctacttggccaatattatcggcagtgatatcggttcattattattacctatgggaaccttagcaacgcttatttggatgcatatattaaaacagtatgatgaaagtatttcatggggcgaatatataaaaacgaccattatcatcattccgctgactgttctttttacgttaacatgtttatatttttggatcagttggttatttctttagcacagtatgaaacgaaaaactgccttctgctattcaagagggcagttttgcatacactagggaagatgcattgtctttagatgatttaacttccaaatgattggctctccatttgcgttaataagctcaatgatattattagagacatcctttaatagaccaactttttctggcacctctcccatatcaaatatgaccaattcaccaatattttttttgatctgctcctcaaaattacgcacaagaggaactttggaaggcatgacaggcaattgtgagttgtcaagagtgtacggtgtttgttcagttgaataaggggtaaaccattttaaatgatgcatagatataaaaagtattttaaatacaggtgagaaaaatacaatataatcgtttaaaacatttgtaacatacccatggatcgatcgacccccagttacataaacttcaataaactggcctttgaccttgtttaatgtatttctatatgaaaaagcttgagtttctgcctctatggatggatcttccggattgatcaaaaatggcttctcagtactggtcattattttcgccttgtttatttgatgaagatgcaacaagggaatataaagataattgcagccatcaaaaataacaaaaatatcctgtccgatatctatgagggtgccgacaaaccttgtatctcctgaaatgacaacctcaacatctgtgttaaggaattgattcaaacctttcacgattctcctcctttaactgaaaaagggcatcacttaatctgatgctcctccattatctattaaaatttacgtttccagtgatagtctatcgttctgacaatcgtttcatagctataatcatccttttgtttttctgaacttttgaaggaacttgaataacctggtgatcttgatgattgataatctgatgatcttggtgatcgtttagatgattttgatgattgataatctgaagattttaatgatcgtttagatgattttgaagaactttttgaacgtgacgaacggccagatttggatgattgataatccgaagattttagtgatcgtttagatgattttgaagaactttttgaacgtgacgaacgaccagatttggatgattgataatctgaagattttagtgatcgtttagatgattttgatgagctatatgattttgaagaaatgaacgaattgctgtccttatcattattgtcttcctggctttgttcatttttttgatcctcttttttgtacgacccttttggtcctaagctgatgctttttatgtgaaaaggatagatgcgaagcacctcttgatttttcactatagtataatggccgtcggcattatctacaaggataccctcaatggcttccggacctccacgattaattgaaacccatttatgagtcagactcttaaaaacctcgcttaaatcatcagcttccaaaactccaactggcgtctgctcttctattttcaaatcaggctcgtgtttacttatacttttgatgtgatggatattaaaatacactaccccatcctcatttgtgtttaacgcagcgtaatcatctcccagccagaccaatcttccttttttagattccggacccccttggttaaattgaactgattggtttattaaatgtccgattaagctatgaaaatcatcagcatcgagcatttcctcagtctcaattgtcgtggtgctattattggtatcctcagtaatacttttcacatgctccaactgataataaattatttttttttcagcttgtaaagctatataatctgattttacagctgttaattttccttttttagattccggacctccacgatatacagtaacaattttatctttcattgagtgcaaaaagttataatacgatatttcattatttgaatgatatttcattctcctcttgctcattcaaattcctcctagtcacttatacatagatgataaacatactgcatatatacgtgtcacatttatttgttgaactaattcaatagcctaattgtcgctttttccgcgaatacccattttcacgcattcataaaatacttaaatgatctttgaggtattgtgaacggtttttaatatactcgcagatcacatccggctcacggtcaaaacgctcaacatcattctttttatatgggtccatcaagataaaaggcctaatccgttcatacatcgccatgattttcggttccatatattctattgtaaaaagagattggagcgttttttctaacaggcgcttgtaggacttgcgaaactcggattcatccaatatccgggcggttagtgtattaaatccttgaattcttacataatcggcagccatccgctctccatggatatccctgccccaagtcgcatcataatcccaaggaatcacctcaaataatccggtttccccgcttctgtataatgcgtagttgtggacaaacccgtcatagtttgaggtgaatacaataccggcaagccagcgcaaatacttgtcgacatccacgtgttttgtcacttctgacttaaactgagctttagggaccgtattaattttaaaaatcatatcctgtaaataaaaatcatcctcctcagtccctgttttcttttcatatccaagctccagcgatgttttcgtttccctttctaaatcgctcatcagagaaaagttggcatcatcatccaccgcataaaaaatcgcgccatcagccagcttccttttcgccaaataatattcatctacggattcaagttcaagataaaccccttcattcttcccattcatctttacaaacacaaactctgcctttggagacagtgtccctagctccgagaaaaaatccagagacaatttgtttctcatcaaggaaggatctttatactccgcatttaagtgaatctctcgcgcgccgcggaatgttttcggctgataaaaggaaatatggtatgacttctttttgaagtctctgatatgtgatccccgataagcaatatcaatatccagccttttttgatttaccttcatcacagctggcaccggatcatcgtcccatatatccttttttaattcacgcaagtcttttggatgaacaaacagctgataaagcggtaaattggattgattcttcatccataatcctccttacaaattttaggcttttatttttataagatctcagcggaacacttatacactttttaaaaccgcgcgtactatgagggtagtaaggatcttcatccttaacatatttttaaaaggaggatttcaaattgggccactattcccattctgacatcgaagaagcggtgaaatccgcaaaaaaagaaggtttaaaggattatttataccaagagcctcatggaaaaaaacgcagtcataaaaagtcgcaccgcactcacaaaaaatctcgcagccataaaaaatcatactgctctcacaaaaaatctcgcagtcacaaaaaatcattctgttctcacaaaaaatctcgcagccacaaaaaatcatactgctctcacaagaaatcacgcagccacaaaaaatcgtaccgttctcacaaaaaatctcgcagctataaaaaatcttaccgttcttacaaaaaatctcgcagctataaaaaatcttgccgttcttacaaaaaatcgcgcagctacaaaaagtcatactgttctcacaagaaaaaatctcgcagctataaaaagtcatgccgcacacacaaaaaatcttatcgttcccataagaaatactacaaaaaaccgtaccaccactgcgacgactacaaaagacacgatgattatgacagcaaaaaagaatactggaaagacggcaattgctgggtagtcaaaaagaaatacaaataatctaagttttcattgtttcaataggctgccggcggaggtacggaagcctatttttttatttgccctgtattagatatatgtcatgacataacatatgcaacccgcatcatttggtttcctttaaaccatttcgttataatcaaggtatcctaacgataaaggcggttgttgctatgtacatatttcaagctgatcagcttagtgccaaagacacatacaagctattgtcaggtaccgttattccccgccccattgcatttgtgacaacactttcttcaggaggagcggtcaatgccgcgcctttcagtttttataacgtcgtcagctcagatcctccgcttctcagtatttctgttaacaggacggaaggacgccaaaaagatacagcgcgaaacgcagtggagaacggagaatttgtcgttcatgtcagtgatgaagccatcattgaagatatcaatgaaacagctgcaagcttaaggccggatgaaagcgagcttacacgcacctcgcttcatcctgttgaaagcaaagctgtttcagttcccggcattaaggaagcccgcgttcgctttgagtgcaaattagagcggcatattacctttgacaatgatcaaggcatcactacagcagatctgctcatcggaagagttgtctgcttccacctagatgaaaaggtgtatgatgcagaaaagggatatattttaacggatgaattaaagcctgcctcacgattggcgggaaatcactatgccaagctgggggaagaattcacactgattcgtcccagctgaagagaaggactatttaaatagaagaaactagtcaaaaagaccttatgattacaaaatatcgcctgtaaataactgaaaaaatatcaaaaaaaagaacacccagagcaagctcggggtgttcttttatgaaacgtttttcctttttcttcgtataaaggtagattaggaggaattggaatgacaaacttttggattttaatgctgatcgctattaccatcagtctcgcctctcaattttttataaagaaaaaatacggtattgataaatccggctggcgatataagcatgtcagcaatacacacaaatggatcgaaatcactttacttattttgtttgtgttttcactctccttttttccagttgaatatttgcttcttttattttttattgtgattgactcaatacgaatttttatggagtggcattatagacctgaagataaacagtatatgtaccacattgtagaggtctcacttatgtttatgcttttgatttatatttgtaccctatagttatttaaatccccacagccgctccgtctccccgaggatcggctccgccttggagaaagccttcttcatcaactttgattgcagccgcttgtcccatcagcggatcatagtcaccgacaacctccacgagatgcccgctgtctttcagtttttggattgttttgtctgtgaatctgccctcgactctgagaccttcgtattcctctccccacgttctgccccatacccagcgcggttcgctgattgcttgctgtggatgcattccgtagtccagcattcgggtaatgatggccgtctgagtctgcggctggccttcgccgccttgtgtgccgtacagaatttttggctttccgcttttacagaccatagccggcatcaacgtatggaaggtgcgctttctcggttcaagcgtgttgacatgattttcatccagtgagaaaaatgatccgcggttttgcagtaatatgcctgtatcaccggctgtgactgccgagccaaattcaaagtacaggctttgaatgaatgacactgcgttgccatccgcatcaattacggccgcatatgccgtatcacttcccaccggcctgctttctgccggttctgccagaatgccgatttctcccgccaatcgtttcgcataatttttatccaaaagcctttcaagcggaatgtcagcaaacgcagggtcagtcaaaaaggcattccgatctacaaaactctttttcagcgcctccacaagcacatgataatactcaaatgaaccgtgctcgatttgggtgaaatcatagttttccaaaatgttcagtgttaataaaccggtaaatccctgagaattcggcggcgcctgatacacactgtatcctcgataatcacttgatacaggctctgcccactcaccccgatgcgctttaaaatcatcgattgtcatgtaactgccgttattctgtaaatgtgagacaattcgctgagcgagatctccttcataaaatgcgcttcttcctttttcagtaatcaagttcagactgtctgcaagctctttttgcacaaaccgctctcccgggacaggcgctttgccccttctcgtgaagatgtcagccgtgtaaggcgtggaagccagcagttcaatattcttttctgtgtgacgacactgatcagctgatacaggaaacccattttgggcataatcgcgtgcgggctccaatacatctgcaagagacagacgcccgtactccttcaggaccgcatcccagctatcaaccattcccggcacggtaatggcactgtcaattccccgcagcggaatcgcgctttttcccttatatacatctctcgttacgttttttcctgaacggccgctgccattgtagacttttactgcctttgtttcctggtgaaaggtcagccaaaaggaatccccgccaagtccggtcatatgcgggtacacaaccgcaagacaagcactcaccgcaacagcggcgtcaaacgcgttgccttccttatccagtatgcggtttccggcttgagaagcgaggtaatgcggactgacgaccatttgctttgtaccgatgacagatctgttcatcacaagtccccttttttaagaaattttcttcagtatagggagcctgatttttcacatctactgatccggcagaaaaactgacgaactttcttcttttcgcaaataacaagatattttcgcattcatttcgaaaacaaatgaaaaattattatttcgatacgtaacttttatgataaaatgattgctaaaaggctacgaaagcaggtggagcaattgagtcatgaatatcaaatccccaaccttgtacttgatgagactgataaacaaattctcacgattttgcatgaagaaggcagaatttcttatacggatcttggcaaaagagtcgatttgtcacgggtcgccgtccaggcccgtatcaaccaattaattgaagccggtgttattgaaaaattcaccgctgtcatcaatcccgctaaaatcggcattcatgtttccgtgtttttcaatgtcgaggtagaaccgcaatttttagaagaggtcgctcttaagcttgaggaagagcctgcggtcaccagcctttatcacatgacaggcccgagcaagctgcatatgcatgggatctttgccaacgatcaagaaatggaagaattcttaacaaaacggctgtatccattgcgaggcgtcgtcagtgttgattgccagatgctgatcaaacgatacaaaagccgtatgggaatgaagctgtaaaggagagaaacgaatgaaaaaccatccttatcgggatatgacggccgcaatggttcgcaccggcatattagggttcggcggcggaccttccgtgattccgctgatccgccatgaagcggtcaataaatataaatggattgacgatgatgaattcggagaaatattagcaatcgctaatgcgcttcccggaccgattgccaccaaaatggctgcttatctgggctttaagctaaaaggcacattaggtgcagttgtggcgaccctcgcccacattctgcctacatgtcttgcgatggtgggcttgtttgcggctgtaaatgtgttaagccattcagcaattgttgcaggtatgatcggtgccgtcacgccggtaattgcggtaatgctcggaatcatggcgtacgagtttggccaaaaagcgcttaaaggtttcggctgggttaccggcatcctgttttttatcatcgcttttatcggcctgcaaactttacagattaatcccggcctggtcattatcattttcttagcgtacggggcgtttcattttaaactgaaagacaaaatcacaaataaacattcaaaagataaaggaatgtcagcctcatgatatcgatctatttatttatggcgttttttatcgcaaacctactgggatatggcggcggacctgcgtctatcccgctaatgtttgaagaagttgtaaacagatacagctggctctcaaacgatcaattctcaaacatgctcgcacttgcgaacgctttgccgggcccgatcgccacgaaaatcgctgcgtatgtcggctacagcgcaggcgggtggcccggcttcctaattgccctgatcgcaaccgtcgtaccgtcggcgctcgcattgatcgtcctgctgcgcatcatccagcgcttccgccaatcacctgtcatcaaaggcatgacgctgtccgtccagcctgtcatcgcggtcatgatgctcattcttacctggcaaatcggcgcagacggcatcaaagcgatcggctggatccaatcgatcgtgattgcgggaatttcgctccttgccatgacaaaattcaaaatgcatccggcatttttgattatcgcggcgtttttatatgggggccttgtgatccctcatttatagaaaaaagcacctggacaggtgcttttttattttggcccagaaatgccgtttgatatgacagctgtttcttctcctgcgtcactcttgatgatgtgcttgacttgcagcgtggttcctgccattctcacagattgcttcaactcggacgaattggtttcaacttgtatccaaacaggaggctggaccttccaaaataaatagagtgcaagaatcagcaagccagcaatgaccgacagcaaaaacttcatatcgcatcgcttcttttcagtaagcggcccgcagcggacagcgcctgatgatcacgaagaatatcgcctggacgattgccttctcccagcacatagcctttaaaggacattcccataaaatgaaaaatatgttcgaattgctgaatcagcggcagcccttttatttttggattgtctccgcccactgctattacatatgcctgtttcactgacatttgctgtttaaaatcaggaaatctcggatctctcaacgtctgtgaccagcgatcaataaacagctttaatgtccctgacatgccaaaccaataaattggggtggcgaatacaagaatatggcactgcaatatccgttcaatgatagaatcgtagtcatcttgaacaggacgaaagccgccttgggcgtgacgcagatcttcaattggctgaattcgatatttctgcaaataaatgtgctccgcatcgaatccttgaacagccttctccgcaagaacatccgtatttccgccagaccgagttccgccgttaataaccgcaattttcatgatgcatctgctcctttgtttacgaatgattttcttcatcttataatggattcatctatcaatacagatgattatttcgattaatccaatcgctaaaaccgatttagaaaggaagagaacaagtggaattgaagcagctgatcacctttattacggcggcagaacatgtaaacttcaccctaaccgccaaaatgcttaattatgcacaatcaagcgttacctctcagatcaaatcacttgaagaagaaattgggacgcctttatttgaacggctcggcaagcggcttatcttgacagaagcaggaaaaacgttcaaatcttatgcacagaagatcattgcgttaacagaagaagcgaaaatggccgcaaatcaagtaagagaaacaaccggaaccttaaaaatcggggcgacagaaagccagtgcacataccgcctgccccctatcataaaagaatttaaacaggcttttccccaagtaaagctcatattcaaaccatatatctccaatgaacaagcgaaagaacagctcttacagggccagcttgatatcaccttcatcttggatgtaaaccggatggaagacgcactgcacgttgaatctttgattcaggatgagatcaaaatggtggctgctaatgaccatccttttcctgcggatttaccagtaacattgaaggatcttcaaaacgaaactcttctgctgacagaggacggctgctcgtaccgcacgctctttgagaacaatttgcatgactccggtgtctatcctaacaaattggaattcgtcagcatagaagccatcaaacaatgcgtgatggccggacttgggattggaatcttgcctgaaatgacagtaaaagatgatattgcagcaggccggatgaaagaactcaattggcagagcgattgccccgttttcactcaattagcatggcataaggacaaatggatgtctgcgccattaaaggcttttatcgatttgacacggaaaacattcaaataaaacctctccacaaggacgacaaggtttttgagaccaggaaagcacacacatacaaaaaaacacttgatgacttagagccccaagtgttacatgtgatttttctgataaaacgttcgcaaaacatgcgtttcaaggtcagccaggcggacagggattggcaatctgctttcttgattgatcaagctcatcgtgatctgatagctgctgtctaaatcaatataattaccgcaagacaagaaaataggcttcacgtccccccgcgttcgcagcgcccggccatatacctcgccgtcaatgagaatatcggtgtatgcaccgacttcattttcaggcatcacgaaatcatagcctttgattttgagataggttttcgcaatcccaatcgtcggcttgcccagaaaaaaagccgcatgggtggcaacgcccatatgattgtaatgcagatatccgttgccatcaaacaagaagacatccggctccgtctccagctttttcgccgcctcgatgatcaaaggcagctcgcgaaacgcaagaaaaccggaaacatacggcacgctgattctccccatgctgtgcactttttcaatgacttcttttgtatcagcgtcaatcacgataatactgcacactccgtatggttctccgttctgctcccaataggcgagatcgacgcctgcgcaggtgttgatggagttgggatggatcgtgtgggataggttgatacgatttctaagggattgttgtgtttgaacaaaatccgattcatcttttagatgaaaatcgtgtatttgatgtatttccattttacttgtttccctctcttcgcgctcaattgtcctgcatgtcgattctagcaatgacaccaaattatatcattgaaaaaagcagatagtataatctgcttttttattactattcatttttcatttctttcataaaaatataatccaattgtttaattaattctttaagttcagtacacataatatcctctaaaggattttcccaatcttcgttttttatcagttcaatcccatagcttccggctggatcaccttctgggtaccaccctacgtcaagcagcaaattttttgtcttatgagaaatctgcaggagatcttgattaaagtcaaataaccaagcatcgtcatttgcctctagcgtcttaggatcagtatcctttaatgtaatataatcaacagtccaaccagccggtatctttagccttaaaaaattgggaatctgttggcttagtggctgtaaaccctctaaaaccccgcttcccacactccagatttgatattctaactcttctaataattgttctatctcattaaaagactcatcttcataaatcttatctgtttttaagccagctactttgatatggtattgattattttcataacttaccttaataaaggccttacgtttttcattttgtagtattagtaattcacatttttcttgcattcttttttctgaacataaattgttcagtactacagaccagccattacagatttttaatggctgcagttgagaaatatggtctctttccatcccgcttctccttgcactccatattgttatactatctataaaaaagcatgccgatgacaacacggcatgtttttaactatagcaattctaatacatcagagtaaacaaggcatctcctaatgttaatctcctgttgaaaggctgtatatgcggcaattcactccactcatacacagtatcgtagtaatcatacaaataactgagttcaataaaccctttctcttgcattattttattaatatagttcgttccctgaatgaattctaaagattcagcggtgcctacaatatcataaacgccatcgattaaatcgtgtcttagggaataactataatctaatacataaacaggaaccaatttagatactttcatattgatttgctgttctaaatgaaaaccattttccccagaaagatcttgcaaatggatatcaatttctcctgaaggattgtttaaatctctaacttcaatttttttcaaaccttttatttgattaaattcatcaggtacttttattttctctgcgcatttgttcttgtaccattcgcctaattccctattcacaaatagacgataaagcaactcaccaatttcaggatattcattaataaacctgattccatgttccataaatagtaaccattccatcctttaatcaagaaaatctaaacttcattccaccaagtagttgttacttgttttaaatgatattcaatatataaaatcacttttttatagtcatctgatgaaaattctttaataggatcttcccaatcattatctttgactagtaaaaccagataattaccttcaggagaaatgtcaggaacccagcctaaatcaagcgttattgaggattgttcatgataaagctgcaacaaactgtctgtgaacaaaaaccaggaatcatcattcggttctaatgttcttggatctatttcaacaaaatgattataatttactttccaaccttgtgttattcttaagggatgtatattagcttttggaacatctaatttaacatgttttctcatttatataacctctttagagagccgttattcttaaagtctgtttttagataacttgtcaaccaactatttgagtgggagacctgaaaggtgaaaatgtagattatgaataatatttacttagctgtacgaacttcattttacaaggctgccccttgcatctatattcatcttactaattatcttatagatcagtttcaatgcaaaaattttaagtttaaaaaacctcgagaggcaagcgccaatcgagggaaggttagtttttttctacttacttgttaaaggattaaaactgatattcttccagaaaaacgttatgagaacattagctgcatctcatattatctttcctctctgcacaagtgattatattcaccaaatttagggaaatcatcccagttgctcttaaggttgtcgctagtctcacgctcttcgaccgaaccggtcttgaaatctgtcttctccattgctatatgaccatcttcgcgaaagcctaaaatcaaactgctaacttcattatcagttgcatcatcatattcccaatacattgctgttcttaagaagattttaccatcacttataacttcaaaatcataattcagatacttacgagtcaagtcatcataaaaacccactgaaacccatttatttgttacatttacaacatatttaggtttttcgccttcggttaataccgcagtatatggttcatgtttttggtgatgtaagtatgcggtacaatcatcaagaatattccaaggctgtttttttatgtccgaccattcatcacaataataaactttcatagtcaattatacaccttcccatttatatccctaataataatcctattttttgttgcttcatcaagaattttttgtggaatagctttattttgaacaggtacttctaatatcaattcacctttcagtcatccgcctttaagagcttttggattaaaaggaccatttgatattttagaccctgaagaatattttttagtaatctcgttcaagtaactcagtgctgtcttttcttgaacgtcactaagttgagtatacttcctggaaactatctccttatttggagaatatgaatcaactacgtactttttgccgcctgcttcttttgcttctagctctacttcattataagggtaacgggggcgattttccttattgaaattatttcctgcttcccaccgttctttaagccaagacggtaatggattcttattagatgacttccccgtacccttaatacctttaccactactaaccatcttcacaatcccaagatccttaacagccgtcttttccacatcgacacgtactgtcgggattccgaatgtaaagccatccggagttacagggcgttctgcgtacacgtggacgtttgttgggactttgaattgttttactttctctagtgttttgtttgctttttggacttttgaatgggttgcaagcgggatgcctttatcaatatgtttcgccagtgcaccggctccaaccaaactcagcacagcttccagcgccccctgcttccgcttctcctcagacactttgtttccaaacatatcccgtcccgtgacggcttctgagaatccgtttgacgcaacaaggccgtatgcacccatttctgtcattttgagaatgtctaaggatttgcctgttttgtaggcgtctaaagcgtgttcagccgcgatagcagcttttccggttttgtagatggcttttccgcctttgaaggcgcggcctgcccagccgacgactggtataaatcccacggctgccatggtgccgactgtgacgcgttcaaagcctatacttatttacgctatataaaacagtggacaacaaactaataaaaaaaccttgaaaggcttcagtgccaatcaaggtagaaaatcaaaccaactcgaagcgtttatttgtttttaataatgccttaagattttttaacaatactattaattccttcaaatataatatctctcataacttcattattactgttataatttctttcatttcttattttattaaaaacctgctttataaccccatcaatcattattgttaatccttctatatcttcttcactaccctcctttttaaaactttcatttattattaccaagctatcatcttttgacattttattttctcctttactctctttctttctcattaaaaactttgtctatataatttacttcatcaaaaatccagtatctatcctcttcaggaatataactagtaaagtcttcccgaacccctgtccaattattaggaacataattttcaaaaggtaataactcaggatacagcgaaagaagcattttttgattaaagtctatatataatgatggccttaattctagaatagtactttcataatcctgatgttcaactaacttctttaattctgaagacgggataatatagtcagtatattcttttaaataaagacgataattatcttcatttacaactgaaatgttatttcttagagaaagagcaaagtccatatcaaaactaaacccgtttttttcataggcttctttatatttcatgatatctagtatccaaacatctctttctgttagataccatgagaattgagaagaagtctttaccccgactattatattttgggcatactccggttttaataacaacgaaaacaccactttctcattctatttttttggctgaatgcccatattcctctaaccactctatccatggttccgccggaagttcataactaactcccggtgtcgtaggatcaacaagctttggagcagttctcccctggttacgagggtttttagtatatccatactgatcaattactgtctccttgattaaatcatcaatctctttaggtaccttaaattctacaatttctccgcctggtcttgctacatctcgataatatttagcgtgttctaaattgtaagcacttatgtttaaatcagcatttttaataggaatagcaatgcttccatcactatttactttaattctatactgacttgttttatttcccgctcctcctccttgaactctgtaataacttactgattgttcgacaggatcgacagattttttacttgattgtaacttatcattatttactttcttcgtatataattgtttcttctctggctttaagtcaaatgtatggccagtcgaagtaacaatctgttctttatttatatgaccactttgcttaattttagaaaaagaataactcttatcaagatttcttcccatcgatagcgtattgtcaaccgacttcgccaatgcaccagcaccaaccaaactcaatgccgcttccagcgcacccgttttccgcttctcttcagacactttgtttccaaacatatcccgtcccgtgacggcttctgagaatccgtttgacgcaacaaggccgtatgcgcccatttctgtcattttgagaatgtctaaggatttgcctgttttgtaggcatctaaagcgtgttcagccgcgatagcagcttttccggttttgtagatggcttttccgcctttgaaggcgcggcctgcccagccgacgactggtataaatccggctgcggccatagctcctgctgtcacacgttctgcggtggagagtttttctccggtaaccggatcaacgccttcagttgctcttttataatcataatagccagtgacttctccagtaaagttgcaaactccatcccatgttttttcgtaccatggtttgtttgcttcttcctcggctttttcctggagacgtcttgcttctgcttgctgggcttttgcatcaatataggttgttccttgattttctacttcaatgacgcttttgtagacttcattgctgtggaaggcttttttgtcatagtacataggggatgcgctcttcccattgctggtggcctgcatgagaacagaatatttggtgagcactgcgttgtccagagattctaaattttgatattcagtggtcagggattcatcaagcttatcgacagctgtgatcgtgtcacgtctgactttttgggcatcgcccatcttatctgcatactcgtcaagcgtgtacatgtcgaggtcaataatatcgctgatgcctgacaaaatagaatcgatttcttctttatgagcggagactatctctgaggctttcaggtctccattgggcagctcatgatccaaaaatgaagtttccacatatgaatcattcagttcttgatctttaatatcgcctgaaatgccgtttaaaaatgcaatttgagcagagacaagcgtcagccagctgtcgacgatttccgcctgtccctgaaagaaatctttaatattgtccgcgccttttcctttaaaattatcgcctaaatctgcaactccctgaaacgcttttttcagcgtattcagctgctcttcaagcgtctcatattgcttttttctgctcttcgcttcttcgattaaagattttgattcaaatactttactcatcgcactgccctttctgttctattttaccgctatcgcctcgtcctgctctttaagtgaatctacgttatcctttgtatcctcgatatttttctgtaccgcttttttgtaatctccgagcatggttttgatgttctcctcacgctcatgatattttttcgtataatcgagtttattttttccattggaccccgcggcgccgattgatacgtcagcaagcgcatctttgacagactctaatgttttgattacagcatcgtatttcaatttaatttctgacataaaaaagatcaccacaatttaatagatttaatttgattaacagcatcctccaagaattcttcacccttagcaagagtatgaccagcaaaattcgctagctttaattctttgtcatagagaaatttcatagattccaactgaataatctccatctgaatcgaagccatatactcgttatatttatcattcacaatcttagatgcttccgatttcgcctcttctcttcccttgtcgaaatcatcggcttttgttcccgtccaatgcttgcccaattctggttttacaatttctttgatttcagtgattgcctcttcttgcagtgtgtctatgtccttttttgcttttttcagcttttcgatcttgtcttccacgtcggaaatttttccgttgagcgaacttttgatatccgccagcatactttcataacccatctgaatcacctcttaatactcaaaaagtcgtatggaggggctgatgaagatagacttttccatactttatttccatatattatattttaaaatagccagaaggcggcttaaatagggtaaatggcttaatttaggcatataacgctcttgaaatgtaggtatttgatcttgtttttgttcgttatacagctaatgaaaacgttttttaaaatgaaatcacctaaagtcatagttataaaggcacttgaaagaggcagatgttgttgatctgcctcttacggcgctgagcttattgttcatgtttatgttcttcatcaggtcggccacgtctgattttgtctttggcttctattattccccgcttctgaccctttggatcaaaagcttgtattagctgcagtcccagttgtacagaacgtttgaaaagtcttttttccttagatcgtcaggtgtgatgaaaaaattggcgatgccgacgtctccccacattgaatcgatatcatcgtctgaatcaatttgtaaaagcatgatggtgtgttctttatatgcgtattcccgtggatcatgctgggtaaaagaagcgtatccgccgattttatggccaaatccgttttcagccagttcattataaatgtcttcttcatcctcgccgaactgaccaaagaactccattgtttccatgcccgtatactgctcaaattgaaaatctgtaggcagcacccattccgaagatttcacaggctcgactgccgcttctgataaaatcggaaaatcacattcgcctgtgccaataaatgaaaaatcagaaacaaggtcgtcttcgttttctatgatattttcaaaatagatcactctgaaattcttttgttcacatcgatcgtcaaaattcaatccatagacgtcatcatgaagagaaatgtagaactgcaggatacctgaagaaggatagccgtcaagctggggaatgtgcgagaaattaatctgcgccagaagcttcatcggctgtccatattcgtcagtcggatatgtttcatgcttggggaaatagggatcaccggcaattttgctgtcatatcgtcctgttttcccttttctcacattcagtttcacgtattctttcgctgatttctccagcaagtcgcggtacggtctcattttttcgggtagatgattcatcagattctctccttttccggcatctccaaggttttattttctggttttcttcgtttcttctaatgtttttcaaacgattgtttaaagaagccctacttctgtataattttccaaacaatagttaaatagtagcaaatgtattcagcaccccgcaatagatgaaaaaaagactggtgcgcaaccagcctttctttttcaactattgaattgcacctgacggaacaaccgccttccgtccgacagaataatactccactcctgcagccaaagcctcatccaatgtgtagcagtttctgccgtcaaatatgagcggcgtttccatcaaatcctgataagccgctaacgggaattgtttaatgtcagcccagtcggttaaaatcatgacggcgtcagaccctttgacagcttcctcgatcgtctctttatattcaacagcttgcgggagaacatgctttgcatggctaactgcaatgggatcgtaggctctgatacgggcgtcgagcgcagcgagacggtctgcaataacaattgacggcgcttctctcatatcgtcggtattcggtttaaatgacaggcctaaaagggcaatcgtttttcccgtcaccccgccgagcctgttcagcgctttatcaaccagcatcgcctgctgattgttgttgactttgataaccgatttcagcagttcaaaatcatgctcgacattgccggcaatttgcacgagggcgtttgtgtcctttggaaaacaagagccgccgtagcctatgcccgcttttaaaaactggctcccgatccgcttatcctgtcccatcccgtatgcgactgcttcaatatcggcgccgaccttttcacatatattcgaaatttcgtttataaaactgatcttagtggccagaaaagcatttgaggcatatttgatcatctcggcgcttctgatatccgtttggtatatcgggatttgaaacggacggaagagctcctccagcgtatttgctgttttctcatcggccgtcccgatcacgatcctgtcaccatgaaaggtatcatagatcgccgacccctcacgcaaaaattccggattggatgcaaccgaaatactgacaggctccgctagatgttcagtgatcagtccattaatcaaatcgtttgtcccaacgggcactgtgcttttcgttaccacgactgtatctcgtttgacatgctttgcgatgcgtttggccgcatctgtaatttgctccagattggcgtgcccgtcgcttttctgcggtgtgccgaccgctataaaaatgatgtctgcctgtgccaagcctttctcatagctcgtttcaaagttcagccgtccatcagctgtattttttctcatcagctcttcaagacctggttcaaatatgggggaaatgccctttctcatttcatcaatcttgtgagcgtcaatatcaatgcaggttacatgatgtccaatctcagaaagagaaacacctgtcacaagaccgacatagcctgttccgatgactgttatattcattgtttccctccaacagttaaattgctgctttgcagcttccgtaatatcgtatgagaacatcctatcatgaatgcgaatgatctcccgcatagcctgtcgggtacagcctgtacagatttctgaaatgtgattcaatcatacaatacactattatatcgctctcaaaaagaaagtggtgaaatgagaatcggctgttaaaaaagaccaaacaattttcttcttttgaccggttgcggaggctgtctgaagatggtctgattccgcaggagaagctctgcattttccgtcagcatataaggaagttccgagccgaattctttctctagaacataaagggcctcttgagtgtgaaaatttctcgttttcacattatgggcatctgaggctacgaaatggatcaaattggcttcaaccagccggagagaaaatgctttcagctgcttgccgaaggtccccgcaagacttcctgaagtaatctgagatgctgctcctttttccacaagatgatacagcaaggacgggttttcgcgaatttccctgttgcgttcaggatgggcgataaccggaatatatcctttcagctgcaaatcataaaaaagctgctccgcatatcggggaacgtgatcaaacggaaactcaatcaagatgtgttttgtatcattcagcgaaagcagctgctgtttggcaaggtcttgttccacctcgccgtagattctgatttcctgtcccggaagcacatgtaaaggaatgtcttctttgattaaacgtttgtttaactgatctgctgcttctctgactgcagctggctcgtttttatacacaccgttgttatgatgaggtgtcgcaatgatcgtccggattccctgacgaacagcggctcttgccatttctatgctgtcggccgaatcacctgccccgtcatccattgcgggaagaatgtgacagtgaatatcgatcatgtcctagcccccttttttcgcaaaaataaataacgggcacgatgcacgttatttattttgcatgaaattgtccttgtttccgtaatatccgtattcagagtgcttcgaaagctttttgccgttcataatcgccccaagaagcttgcttttgcacgtttcaagcgcctctttcgcttttgcggcttgttctttttctgttttcccgcttgaaataaccagaacagaaccgtctgccacgttgcctaaaatctgtgcatctgctacggcaagaataggcggcgtatcaaaaatgaccatatcatatgccgcacacgcttcgtatgcaagctccttcatccacttcgaggagagaagctcggccgggtttggcgggatcgggccgctcgtcagcacgtcaagatgtttttcattcgatgcctgtacagcctgctccatagagcttttctttaataaaacagatgttaagccaaccgtattttcaagaaaaaaggccgtatgtactgttggttttcgcaaatcagcatcaatcaggagcactttttttccctgctgggcgaatacgacagccaggttggcggccgttgttgattttccttctccgggacaagccgatgtgatcatcactgatttcatctggcggtccactgaagcaaattctatattcgtgcgaatcgtccgatattgttcagagttcaaggatttcggctctgtcattgcaatgacatttctccgcatccgcgagtctctgctttttctaagcgccaaaatgtccactccccgttttttcagattggaaaccctgtaaggtctttgctgttttctgctcattcgcaatggtggaaactgtccctaaaacaggtatgtccagcaaggattcgagctgctcttccgatttgatcgtattatccaaatgctcgagcaggaaggccagtccgatgcttcccgccaatccggctgcaaacgcgatggcaatgtttagtagcggctttggcgatacaggggacggatgttctgaaacctcggcttttgacagaatgctgacattgtcaacattcataatggatgtgattttgtcttgaaaaacagatgctatagtattggcaatatgagccgctgtttccgcgttttcatccctgactgatatgttgaccacttgggagtcctgttcgctggatacggtaattttgtcattcagttcttgggatgtcatcgacaggcccatttctttaatgacttcatctaagatggcaggacttttaatgatgacattgtacgtattgattaactgaagattggtttggacatcgttaaattgaacttcttttcgttcatttttcgattggttgaccagaatctgagttgaattttcatagatgggtgtaagtgcgaagaaactaatgagtccgccggcagcagtggcagctgcggttacaatcataatcaaaagtatgcgttttgttaacgttgataatatctcttttaagcttgtagattctcccatgatacctccaaatctcttataacatccttttccatctacgattatacaacgttgaaaccgcatttctccagcttttcacgtgacataattcgacatttttttacaaaacgaaatgttactcttttttatgtaagcgctatatttactgtgttgacagcgctgtctcattttctcttattcgtgcagtcacgtaacctcgcataaaaaaatcccgcaaaaggcgtgcgggatttttatgttgcatatccatttttaatatgagaaatcaaattttcaagcatttccttcgtcgtcatctcagatgactgctcaccaatttcatgtgcatgcatcaaaattttcagaaattcttcttgattcaatttcttttcactcatcttttttttcctttcagcttccattaagttgaaaacacgattattatatgatgctggttatcaatttgcaatctctaatacatcattcgacacatcccattttttatgtccttttttaggaaaaactttttaaggccgatgtgttgcgatataatagagaaattggatctttttattacgtgactcggttaggagcgataatcatgcttcagaatatgatttccaaagacgatgtgctggcatctgctgaacagttaaaagaacttcttccttacaatgaggaaaatgttcagctgatcaaaaaagcccttattttatatcggcaggattcagtctatcgtttacaagcagtgagtccgacggaagttacggcttacgtgcaggatgttgtgcctgtgcgggtcacattgaacttgtttgtcatagtcaaaagcggctgttcatgtccgtccggaagaatctgccgccatatgctggctgtgtttttatatgtatatgcaatgttcgagcgagtgggtacttttacagagcattggctggagagggaaaagcttgaggaaagcaaagagctcgtccgccgccagtttcaggaaaaggtgctgcctaatgaagaatcgctttcaagctggcttgctttttttgattcagagttttctctctggcaggcacgtacgccagaaggcagccaaaacatgcagggcctctattacggctacctgtccgcattaaaaaaacatgcgccgaacaagccggagctgaaaagcctgtatcagattcattccgcgattgcggtttggcttcgcatgttcacattgattgaagcgggcaagctgaaccccgaacaagatttttattccctcaatccgtacgttgaacagctgatggatacaatctacagctctattgacaaattaaaaacgtacgcgctgtcttttgcgcttgatccgtttttggataaaacaccggatgttatccgacctttgctgttgaaagaagaaattttccaatatgaacgcatccgcgtcttcggtgaaatttggagtgcgctgttgtcgcggccaaaatgggtggcacgcgaacaggagatattgaaaaaagaagctggacggcgtttttctcccgaattgcaattcgggcgcctgcatttggaattcctgcaaaagaatgatgacgttatttttgcggaagcggatcaattcccgccggaagcgctcccttatacgttccaatggctgagtgaaatgactgccaagaaggactggaaacggcttaaaacatggtaccagcaaattgagccaattgcgatgggttatacgaagctggataagccgtttaaagagattcgcgatgtgatcggcgagctgttccttctgttgaatgcctatgtgcagcaaaccaatgatcaagcgctgtttgagcgctttgccgcgggctgtctgccgtatacgttcacagaatacagccatcatttatatgaaaaaaaacgctatgccgagtggattgaaattcatagccttgtcggcttttccatcaatgaaatggataaaatgatgctcaaggaaattgcagcgagcgaccctgaggcgcttataccggcttaccatagagaagtggcttttttcattgatcagaagaaccgcagctcgtacaaggaagccgcccggtatttgaaaaaattgcgcaccctgtacaaaaaagcgaaaaagcagaaggtgtgggagcggtatattcagctgctgagctcgcattacaagcgcctgcgtgcgcttcaagaagaactgcagaaaggaaagttgattgatggcgagtcttaaagaaattctcatccacgtcgaacaaatggaagatgggtcatttacgctctcagcctttgatgaaaatgagcagcctcttccctacagccatatgaaaaagcatttgttccaatggcatgaatcctcattttacggaacctttctagaggatgtcagcttcatcgggacgactgctgtcctgctatcgccatggatgactgtagagcttctcggcaaaaactcgttcaactcattcagctccgtgcagcttacagaagaaacggagccgctgatcgaggcggcatcgaccatctatgaatttatcgcggacggcgattttctgcctgactatgacgcatggacaaacggtgtttttcgctggaaagaccgcgataatatactggaaggctttactgcggaatggttttccgctgccgtacaggattacatccagtacgacgatgacctgcgggagaaatgggaacatatcaaggaaaaatcgcctgcggttacgacattccgcggccattttcttgatgaagaggattttctggaaggcattggctggattgacgatcaatctccatttactgtcggcttgcgcttaaatgaaccggactttgacggagacgaatggaagatcgagatgtttttacgcgataaaaagagcggcgctgtagaattctttgacggactgaagagcctcaaaaaatcgtggcaggcgtacagcgataaaatcgcgcgtgagcaggaccgctttcacagaacggttccgtggctgtcgtttgattccgggacaacgctgatctcggaggaagaagcctggatcttcctgtcagaagcaagtgagacgcttgtcgatatgggggtagaaatcctcctgccgtcctggtggcagattgtcagagacagcaacatgatgctgaaagcaaaggtgtcgtcctccccgcgcggcgagtcatttgtcggcatgaatgcactgcttgatttcaactggcggttcgcgacaaatggaattgaactgactgaggctgaatttaatgagcttgtcgccagcaacaggcgccttgttaatatccgcgggcaatgggttaaaatcgatccgcagtttatcaaacagatgaaacgcctgatggaaaaagcagaatcagagggactccacatgtctgatattctggcgcgcgagctaatggatcagcaggatggcggacttgaggattcggacctgattgatacatctgcttttgccggcattcagtttgatctgtctaaacagctcaggtcactgattcgaaagctcactgccgcggaaaacctgccggagcacgaagtcagtccttctttcaaaggaacgctccgcccttatcagaaatacggcatgaactggctgctgtttctgcgggaaagcggttttggcgcctgtctagctgacgatatggggcttgggaaaacgattcaaatgatcgcctatttccttcacgtgaaggaaagcggccggcaaaaaacgcctcatttgattattgcgccgacatccgtacttggcaactggcagcgggagcttcaaacctttgcccctgatctgtctgtcgcgctccattatgggccgcgccggccaaagggtgatgatttcgccgcgcattatgaaaacgcagacgtggtgctcacttcatacggtctgtcacatgccgatactgaagagctttcttctgtgacatggaacacgatctgccttgatgaagcgcaaaatattaaaaacgcgcatacgaagcaatcacgcgcaatcaggaagctgaagggtcttcatcatatcgcgctgagcggcacgccgatggaaaaccgcctgactgagctgtggtccatttttgacttcatgaataaaggctacctcggcagtttgaccggcttccataaacgctatgtgctgccgatcgaaaaagaccgggacgaaaagagaatcggacagcttcagcaattaatccggccattccttctccgccggacgaaacgggatgaagaggtcgcgcttaatcttcctgagaagctggaagaaaaagaatttatcccgctgtcagccgagcaggcatccctttatgagcagctcgtcaaagacacttttgaccatatgacgtccctgaccggcatgcagcgaaaagcgctgatcctcagcatgcttggacggctcaagcaaatatgcgatcatcccgcgctttacttaaaggaagagcaaaccgagctgctggccggcagatcagtcaagctcgaaaaattgctggaactgatgacagcgatccgcgcccaaaacgaaagctgcctgattttcacgcaatacattcagatggggaacatgatgaagcggctgcttgaaaaaacgttcggggaacctgtgcaatttttaaatgggagtctctccaagcaagagcgggatacactcgttgagaaatttcaaaggaaagaatatccgacactgattctctcactcaaagctggaggcaccggacttaatttgaccgccgccaatcacgtcatccattatgacagatggtggaacccggcggttgaaaatcaagcgactgaccgtgcataccgcataggccaggagcgctttgtccacgttcataaaatgattacgacgggaacaatcgaagaaaaaattgatgtcatgcttgaatccaagcaaaccctgaacgatcaaattatccaaagtgaaaactggattaccgagctttccacacaggagcttgaagaactgtttacattaagcgctacagcgcaatgatcatgactaaaaaagctggctctgatagagccagcttttttccgttcatagccgtcacgccgaatctccaaaaaatccgttacgccggttatatcaacaggatgcgcttttggagcagcacatatacctacagcaaatgtttcatcatatgtgcgacaccatgttcgtcattggttaaggtgacagcatcggctatcgatttgatgtcttcccgggcattgcccatcgctacaccttttcccgcagcctccagcatcgatttgtcatttaaactgtcacctacagcagcggtttcctcgagcggaatattcagctgttttgcaagcctcttcagcgcctgccccttggaagctttgcgggaagaaagctcaaagttgtgctcagccgaactgacaagcgtcaaatcttcggcatgctcatatcttttccagcctgcctcaagcttttctttgaagaaagaaaagccgagaatattgtaaaaatcgattggctgatcggcttcaaacagctcttgaaaagagttaatgtaagcaaagcccgattggctgtattgcacctcggccgcctgcttaaggacagaaagatccgcttccgggtttgcgcttctgaatctgtccagctcaacatcaagaagttctctgccgttttgcggtgtataaatcgctgaacctgtgaatacctcataataatagttttccgactcaagccatgagagaatatcatacgcccgtttcttatcaatcgtttcgtgatgataaagcctgccgtcgggatcgtgaatgacggcgccgtttgcactgatgacccatgttttgatccccagcggttcaaagattgacatgacgtcaaaatgagcgcgcccagttgacaccaccacttcaatgccatcccgctgcgcctgccgcagtgcgttttcattttccaagcttacctgatgcttgctgttgagtaaggttccatctaaatcaatcgcaattaatttcacgtttgtcagtcctttccttcatcctgctctgtcacgagaagctcaacgccgtttcggtcaagcaagtcacaaaatgcctgattcggcagcctgtctgtaatcaaaaggtcgatttcattcagctccgcatactgataaaaactggtgctgcccagcttcgaatgatctgcaagcgcgatgacctgctttgcctgctgtatcattttccgcttcaccatgccatcctcttcatgcgcaattgtaatgccatgttcggaaataccgaccacaccaatcagcgctttatcaacatggtagcttgagagcttttcaatcacagaggacccgtacagaaagcggtgctccttttccagcttgcctcccagcagataaatttcaattccctctttatcggacagcacatccgcaagattaatcgaattggtgattaccgtacaatcaaccgcattcaaatgctttgcacatgcttgaacagttgtagaggcgtctaaaatcacccggtcaccatcatgaataagcgatgctgcaagcctgccgatcttatttttttcctcagacactgttttcaggcggccggaatagctttgaattttctgatgcacagtcggcaaaatggcgccgcctcttgtgcggatgatggcattctgttcctcaagtttcacaagatctcgtcgcgctgtatcccttgacacttgcaggagcgtacagatctgttccgttgtaattcggttatgctgttttaaaaaatccaaaatcgctactaatctttcttcttggtacacgccctcattccttttctcagcaatcatttataagtaattataagtttttatttaattctattcaacattaataagtgattttaagtaaaaatacgtcgagagaaccaatttttcctaagtggacaaaaagaaagaaccagtctggtcgactggtcaattttgaggggatgatgcgaagattcggataatggtgaatggatagataacgggaggagcaaggggtgtcaatcagcagctttttcccggggtttagggtccataaaacgaacagtgtcagccaacacttctgttacatacacgttaacgccttccgcgttttcatagcttcttgtctgaatccgtccgcttactccgacgagagaacctttttggcaatacaacgccgtgttttcagctgtttttctccaaagtgtgcaattgacgtaatcagcttcgatttcacctgaagcattcttgaaactgcggttcaccgcgagcgtaacatgtgcaactgccgcaccggcggaagtgtagcgaagatcaggatcttttgtaagacgtccgacaagcatgacctgattgaacatgcgattcctcctctccttgcggttgtatgtattgtaaatgatgcaacaagaaaagaaaaacgcttaaaaatggctttcagcctctgtttttatctttcgttttcatttttccttcagctaaaaacatcttttgctttttccctttgaagaaatatgtactttttaaaaaacggaaaaagatttgctttgtcagccagttttgcgtattcatgcgcacataggaagagccatcccacgcaaaccactgaaagctcaattttttttccggcattgacagcttgattttatactgctccatgccatcttgtgtttcgtataaaaaacttattcttccttttttgttcagatgaacctcaaacacttctttacggcttaacatatatgttacttccttttgaatcaaatggctttcagaaggagcgccgtcaatataaatttcttttaaacgaaattgattcataccacatctctccgtaatccatagtcagttacagtataatgaaaaaatagaaattattaaatgtttcgctcatacaaaattctttagccccagcattgcaggattttttcctcgaaaacgtttatgttataatggaaggcaagaaaactttggaagtaatcggggtgagaagaaatgaaaacctttaaactggttgacctgaatgtggaacgagtggacaaggaagaacaatcaatcgaacagtttccccttattgacggactgattataaataaagaagacggtgaaaatcactggctgattgaggcgcttgtacagaaagaacatctgtctttttttgaacagcttcaaaacagccaatctgaagccaaagtatttgtaacgatcacgaaaaaaagcaatcgccccgcccagctgacagcagcagtgaaaaatatcgtcaagctggaagaaagcatccaggttttactctatggacaaatggtaacaagaaaacagcagggcactgaaaccattctcgagtcccttgtaaaagagggctatacaggaacaaaactcattgaggcatttaaacaaaagttataaatatgagggggcatgttccccaaaacagacacagaaccgaagagcatcacaatagacatttagaatagatatgttctgcatgaaaaaagctgccgttttgaacggcagcttttctcttcgtgctttcactcttgcatatttaatttgtatggccaaaagaatcaaccaattcccctttcacaacaaggcgcccttcagttttgacagccttgtcacatgtgattagcgtaatctcttttttgtttgtctcctcaactacatctgcatccgtttccgatatgatgtctttagatgttacagaatagatataatcctttttaaaatccgtgatgacaatttgggcacctgtttttatattctccagaggtccgaacagaagattcttttgcttcaaatgatggcccgccaacggataatttccctcacccattttttgatccgggcgcattgttgccgcccctatcaaaagattttcattggttgtgccttttacgatcggaagctccagatcgacacttttaattgttatctgccgccttgattgtgaagtaaaaataagtatatttcacgtgctttcgacgttctccacttgactggaatgctttaatggcgatcccggcatctgtagcttcaggctttccttcagaggaatcagaaatctcaaactctattttctcagtgttcagcacataaccggctggcgctttcgtttcaacaaaagcgtattgtcccggtgcaaggcctgaagctgtgactttatgatgccggatatgactggtttcgaagtctgtatgaaaattcgcgaacgattcagcatggtggatcttccggttctgatcattacagctgccattatcggccatgacaaatacaaggcttttcatgccggagcgaatgacattttgcaaaaaccttatcattactctgaatttatggcgcgtattcaaaacctgatcatgatgaaacatacagcaaatcaagccacaagaatggaaatggcgtttctccagtcgcaaatcaagcctcattttctttataatgtattaaacacgattatttctctcactcatttggatattgaaaaggcccgggaggtaacagaggaatttaccaactatttaagaatgagttttgactttcaaaatacatcagccatcagttccttcagacatgagctttcgattatcaattcctatctttctatagaaaagacgcgattcggtaatcggcttgaggttcttttcgatatagatgaagacattgactttatccttccgcctttaatgattcagcccttggtggaaaatgccgttcttcacggtgtcagcaagaaaagaggcggaggatggatcaaactgacagctaaaaaacaaagcaaaaatgagtatcacatcaaagtagaggataacggtgcggggatgcctccggaaaaacaaaaagatctcttatctgcggatttcgatcgcagcgtcgggttgaaaaatatcaatcagcggctgaaacatttttgcggaagcgagttgatgatcatcagcactccggatgcaggcacctctgtctcaatgctcattcatctcgctgaaacaacagaaagccccgcgggactgaaggacatagaacgaacctaaacgaaaattgagataaaaaaaagacgccgtttataacggcatcttttttattccggcgactttgcttgctgcttcagcaggtctctgatttctttcagcagctcctcctgcgcatccaccgcttcctccgcagcctcttcttctgctgcttcttttttgcgccttaacccattcaaagtccgaatgacgataaaaatggagaacgatataattaagaagttcacaatcgtctgtataaagctgccatacttcactacagcatcgccaaacgtaaacgacaggcctgaaaagtcaagccctcccagcagcaaaccgaccaaaggcataatgatatcatttactagagatgtgacgatctttccgaaagcgccgcctatcacaacaccaatcgcaaggtctacgatattcccccgcatggcaaaggctttaaattcattccacatacaatcacctgcttttctatatttgtaaagaaaaaaagacaaatgtgccgctggccatctgccttttttcaattattctccgagggcaaaagtcagttctacttcgcaaacgacttcgccatcaactgtggcaacgccttttccgcgcccgattgtgccgcgggcacgaatgatttcaacctcaaggtgaagctggtcaccaggcttgacttgttttttaaagcggcagttatcaatgcctgcaaaaaaagccagtctgccgcggttttcttctttaatcaacatcgcaacagctccgacttgagcgagtgcttctacgattaatacgccgggcataaccgggtactgaggaaaatgtccgttaaagaactcttcattagcggttacatttttatagccttttgcccgtttgccctcttcaacttccgtaatccgatccacaagcaaaaacggataacggtgaggaataatttctttaatttgctgagtatcaagcattgtcttgacatctccttcatctgcattagtatgtatagcaatcatcaaagatccaatctgtacatttgaaaagtatattatgaattaatctctttttcaaccgcgctaaaatgtaaccaactgtcaatgagagccgtcaaaagttatgatatgataattatagattttaccaatagcaaagaggtaggaaaatgatttcgaagtttattgaaaaaagaatgctaaacatgttagacgagtggtattccgcaatgagcaaacgcaaaatgaatcacgtttgcacactgaaagagaaaattgaccagcaccttccaaagatcaaaaagaacacaaaactttggatgcgttatcaattgtttcaggcccgccatcagctgctttttgaaaaccagaacggactcgattcattgttcgatgacctatatggcctggaagacaaaatggatgatgaattgaaatattatctgtattttttctctgggttatatgagatggtaaaaacagctccgaaacatgcagtacatcattttaaaaaagctgaacagtacctggccgccattcaaaatacgtttgaagccgctgatttatattatcaaaccgccggcgcctattacttgatgaaatcaccgccgctttccatccaatacgtcaaaaaagcattacacatctatttgcaccaattcggctatatcaaaaaggtaatcacctgtaaacttttgctcgccgtgaattatattgatcaagaacgctatgaaaaagctgaacagcttttcaaagaaatcattaagaaaacccagcaactacatgacgaaaacctgctatgccacgcttattataaccttggctttttaaaagcgaccgagaaaaaagaccaggaagcgcttctttactttagaaaagtattaaagaatcaagaatttgaaatgaattcaccagtctcatatcttcattgtgtgtacgagtctgtcagagcgctttttaaaacaggaaacatcacagaagctaaagccgtccttcaaaaaggaaaagaattatctgaaaaggtagacattcaaaccatttatttaaaattaaaaacgcttgaagccctctacacctcagtggaagatccctatgagcagctgctcgaatatgtgcttgaattagaaaaaatcgaggcgtgggtggatttagaagtgctgttagaagatattacggaatactacaaaaaaaaggacgatttcgaaaaagccgctttttttatcatgcgcggctgattgaaaaacgcccattttcttattatctgactgaattgattaaaccgagcatttgatctcccattgtgatcgttctgctgttcagctgatatgaacgctgggacgtgatcaaatctgtcatttgttctgaaatatcgacattggacatctcaagtgagccctgctgcatgccgatgttttgtctattagcgccgtttagctcttcaaaagctgccgcattatcaatagagaaaaggttattcccttcggatttcagctcttgagggttattcacttggacaacgccaagattaaaccgctgaaccgcgtttccgtcagatgcggttaaggtgccgttcttattgatggtgatattcttcattgagctgtcgatgttcactgtattgccgttctcatcaagtacgggatacccatttccagtgacgagctgcagctggttggcattcgcagcggacggcgttacatacagcgccccgtccctcgtatactggcggtttccatttacatttacctgaagatactggtatggagacgtaaatgcgatatccagatcgcgatcggtcttctgaatgcttccttgatcagagaccaggcgtgaattcatcatcgctccgacgccaaggcgtaagccgggcggcgttttgcgggcttttgccacttcctcgtttttttcatcaacctgatcgaattgctgtctgacaagctcagaaaaattcgtatcttttgccttatagccggttgtgttgctgtttgaaaggttgctgctgattgtgtcaatctgctgctgcagctggtttaaggttgttgatgccgttagcattgacctgagcatagttgatgtcccccgttttttcttccgttatcttaaatttttccaatttcatttgctgctttatccatacttttatcgtaagcctgaataaccttctgattcgcctcaaacgatctgtacgcttcagtcatttctgtataggcgcttgtcacatccacgtttgaaagctctgagacgccttgttttaatgaataggatacctgattgtttccggctgcgcttggcagatcattaccgtccgccgtgctgtacaaatcatttccgtcccgtttgagagtgcggacatcttccgccattctgacatcaatctggccggctgtgcgtccgttcgttgtcacagtaccgttttcagacacagtaaaattctcattatcaacagtgattggctggcgatccgtcgataaaatagggcgtccgttgatcgtcagctggttgttctcatttagtgaaaatgtgctgctttttgaataacggattccatccgctgtttgaaccggataaaaaagagcagctttttcattggtttccgcattcatcggaacttgattttcgatcaatgcaatgtctgtaggctgatctgtggacttcaggcttccctgtgtgaagagaggcttgagctcctgcatatacactccggtattcacggaaccgatttccgtcctcgatgtcccggccggagattttgattctattctgctgagcagcatttcagggaacgcgcgcatcgagccttgatcagctttatatcctgatgtatttgcgttagcaatattatttgaaagcatttccgttcttcgctgctgggcaatcattgcggatgttgctgtatataatccttttaacaaatttcccacctctaaaaatggcattttttccagttgtcatataggaacgttcgttctataataaaaactcagtattttatcctattatcgtcatttaacatcttttcgtgaaggctttttcataaaaaaacctcattctttttcagaatgaggtttgtgaaatcagcttagtttgcgtttaggaagcttgtccatattatcaagcatgacacctgtgccgatggctacgcaatccataggattttcagcaacgaggaccggtaccttcagctcttcagcaagcagctggtcaaggccgtttaagagcgcgcctccgccggtaataataacgccgcggtcaataatatcagcagaaagttcaggcggtgttctttcgagcacttgttttgcagcctgaacaataacagcgacagattcacgaagggcttcttcaacttctttactgtttactgtaattgttcttggaagaccggaaaccatgtcccgtccgcgaatggaaatttcctcgtgacgtgcgtctgggaaaacagttgcgactttaatcttaatatcctccgcagtacgttcgccgatcagcagcttgtactcgcgtttgatataatttaagatttccatgtcaaacttgtccccagccattttaatagaagaggaggtgacaatatcgcccattgaaataaccgcgatatccgtcgtcccgcctccgatgtctacaaccatgttaccgcttggctggaatatttccatacccgcgccgatagcggcaactttaggttcttcttcaaggtacacatgtttcccgccgcttttttctgcagcttctttaattgctttttgctcaacggatgtaatattcgtcgggcagcaaatgagcatgcgcggctttgagaacaggccttttacattcagcttgttaataaaatgtttcagcattgcttctgttacttcaaagtcagcaataactccgtctttcagcgggcgaatcgcaacaatattcccaggtgtacgtccaaccattcgtcttgcctcttcgccaaccgccagcactttgccgctgtttttatcaagtgcaacaacggaaggttcattcagaacaattcctttacctttaacatggatcagtacatttgcagtaccgaggtcaataccaatatcccttgcaaacatctatttatatcctccttgaaaatctgtttcacagtaaatatccacattgtgccctaattatatatattatcataaaatatagaaaaaaagttggaagcacaataagttctttacaaatttttgcggatgttttatgaacgatttcaagaaggcaatgccaggtgattacgattgctgaacaggctctccttcgagaatttcatcttttttatatttgagctttgtcgcttctcctcctcttaaatgcctgatggatttatgataatcgagtatttctttcacttcgtttgccaagtcggggttaatttcaggcagacgctctgttaaatccttgtgtactgtacttttggaaacaccaaattccttcgcaatgacacgaacggttttctttgtctccacgatgtacttccctatcttgattgttcgctctttgatgtaatcgtgcacaccactcgacctccctaaaatggatgtgagaagtgtgaaatgagatccgtattctgtaaagagtcgttcattatgccgcttcttcgttgtatggttttaaaagtaagtttgtgaaatatgcccacgatccctcacctcaaacactctctttgttaggtttgtaacagtgtattagcattcttttgggaatatgctaaaaactcaataaggacaaggggtgaaacgaactttttcagattcagcaaactatttcgcgtcactaaattttcatctttacaactattgatcgctcctgtaaaatgaaataagcaattagttacttaggtaagttttttagaaggagaccgacatgtcctacgtcaacagacacctcattcatcaaatcaaccaaagcgcccgcctgattgccaagaaagccaatgaacagctagagccattcggcctttattcatctcaatggtcagttttatattgtttgcgtacgatcggaccaatgactcaaaaagagatttggtcctatttaaatgtggaagcgccgactgtgactcggacgatcaaacgcctggaggagaacggctgggttcagagacggcaaggtgaagacaaacgggaaaaacttgttgtcctcacaaaagaagccgagaaaaaatacgaagaaatcaatgtgaaaatgttgaaattcgaggaagagctgcttgcagatttccgggatgaagataaagaagctttttctcatttattccgcatgtttttacaacaatgaaaataaggaagtgacatacacttgaaaaaagcggatgcgatatggaccaaggattttattatggtcctgcttgtcaatttatttgtgtttgtgttcttttatacatttttaactgtattgccgatctatacactgcaagagcttggcggcacagaatcacaaggcgggcttttaatcagcctgttccttctgtctgcgatcattacacggcctttctccggagccatcgttgagcgtttcgggaagaaaagaatggcgattgtatcaatggcgctcttcgccctatcatcttttctgtatatgccgattcataacttttccctgctgctcggattgcggttcttccaaggaatttggttcagcattttaacgactgttacaggtgcaattgccgctgatattattccagccaaacggcgcggtgaagggcttggatactttgccatgtctatgaacctcgcaatggcgatcggacctttccttggtctgaatttgatgagagtggtaagctttcctgtattctttacagcctttgcgctgtttatggttgcgggcttacttgtttcgttcttgataaaagtgccgcaaagtaaggacagcggtacgactgtattccgttttgcgttctcggatatgtttgaaaagggcgcactcaaaattgcgacggtcggtttgtttatttctttctgttattcaacagtcacatcatatctgtctgtattcgccaaatcagttgacctttcggatatcagcggatatttctttgtttgttttgcggtgacaatgatgattgcacgcccgttcacagggaaattgttcgacaaagtcggaccgggcattgtcatttatccatcaatcctgtttttctctgtcggactctgcatgctgtccttcacacatagcggcttaatgcttctgctttcaggggcggttatcggtcttggctacggatcaatcgttccttgcatgcaaacattggcgattcagaaatctccggctcaccgctccggttttgcgacggcaacgttctttaccttctttgacagcggaattgctgtaggatcgtatgtattcggattgtttgtagcatctgccggcttctctgccatttatttaacagcggggctgttcgttttaattgctctgcttctctacacgtggagccagaaaaaacctgcagaggctgaaggaaaagtgtctattgcagaataacttgtcagactgccgggaaatcccggcagtcttttttccattaaaacacggcgccctctcggttgaacgagagaacgccgcttatagcaattattcaatgacaggccgcgcaggtgaatcaggatctaacgaaaaatcataggacgcttcatcacgaaacatcggatcggcatatatggattgttgatcgttttttgttgcttttcgatacgaagaaaatgaatcatattctttctttttccacatccatatgccgtcttgatccgcttccttgtggtacacgttatgattgaccgtattaccttcgttttctgtaaagtcgtttccgataaataatctggaatcaccggccgtcaatatattcttttcaattgtgttgtttttcgtatcgtactgcagcagcagctgtccgccgtacagtccctttgtgtcattccggtacataatattgcgggcaatcagagaattgctggtgccgccccgctttttgtcatatcctccgattgaaataccggtgtacgcattgttgtacactttgttgtctgtgatctgaatggcatttgcatactttcctttgtgttcagacgttgcttcaatcccaatatcgttatcgtaaactgtgttgttcttaatttcgatatcgtgtcctccatcgacataaatcccgcccgctgagtattcatctccataagcaggattgccgtaagtcgagttttgataaactgtattgttttctacgactccgtttcgcacgtaatcgtttttatccgcggttccctcataaccaattagatcaatcccgatgttattattgttgcggaccacattgcctgcaactgtgaagccgtcgatattaccgttcagcacaactgcttcactcgctccaagcgtcagtttctcaactgtattgtcctcgattcggatgtctttcatgctgccagtcccataaactgcgattccgtgagcatttccttcatccgctgttgtcttaatcccccggatgtgattatccttaatggcgatatgactgctggaccctgatacataaatccctatagcagttgcttcctcagatgaaacagaaagatcttgaattgttaaaccgctgatggcaatgtcatgtttatcgtgaatacgaataagcggtgtttcatattcagcgttcgcaacggattcaccgctaatcacgacgttttcattttcatagtttcggaatgtgataggctttccgtccgtaccgctgtgctttacatcaagggtctcatgatacgtgccctcccgaatcatgacagttgtgccggcagcagccttctcagatgcgtgtgccaatgtacgaaacggcttttcttttgttccttcattttgatcactgccatttggcgaaacatacagataatccccagatccttcctcattcgcttttgtcttatcataaacgaaagcgaggatgacagacgttaaaacacccgccaaaagaataaaataccattttctcattttcgattcccatttcgttttagaatagatttctaaaaccattataaatgttctatttatggaaaaccatttcaaaaatatgaaaatataccgtctaaatagatcttattcagcctggcggacctgcgcatgttcaactgtttcaattgccaatgatgcaggcgggtgaacacgcatcagaacaatgtagaaaagaaaggaaatcagcacacctacaaaccaagaaatatcgtataagctcttcaatacaggaacatacatgccaatcagcgaaatcagcgctcctaacattgtggctgcaaacgcacggtaattgtagcccttccaatacacataccgtcctgtttcggaatacaggtcatctaccgagagctcacgtttgcgaatgataaaatagtcggccatcatcacgcctgccaccggtccaagcatgccgcctattaagccaagaaacgcatacacgcttgtcgcgctctccatcagcttccacggaaccgtaaataaagcgagcaacgctgtgataaagctgccacgtttgaaattgatatatttcggcagggcattcgctatatcataagcgggtgatacgatattcgccgcgacatttacagagatcgtggcgatgcagagtgtgatcacggacaagacgatgacataagggttatcaaaccgcgccaaaatatcgacaacatcccaaatcggctctccgaacgcgacctgcgagccggaggtcaccgtaatacttgcgaatgcgaacagcgcaaacgttcccggcaaaccgtaaaattgtcctttgatttgctctttttgtgtttcagcaaaccgtgtaaaatcaggtatatttaagatcaatgtcgcccagatgccgatgatgccagtaactccggcagcaaacggccagaatgtttctgaaaacgtatgaaactttcctggttgagagtatatcgggcccaatcctccagcaatatcaacggcccaccataccatgccgccaaataccagatacactaaaggccctgcccacacctcaaaacgtttaatcgactccatgccgtgatgcaatacgagtaaatgaatggcccaaaagaatacaaaggaaagcaaaccggacaagtgaatgccgagaatgttccactcgccgccaatttctccccaacctggccacatattcaaaagcaaaatgttcagtgccgtgctacccgcaaaggtctggatgccaagccacatgatagctgtaaacgcccttagaagcgcggggatattcgcgccgtatatcccgtaagaagcccgaatgatcactggaaacggcagcccgtattttgtccccgcatggccgtttaaggcaagagcgccaaataggataagtgatgccgtaataatgatcgccagcacctgccaaggcgaaaggccgatcgcaattaatcctcccacggtcgcgtaggtcggtatgttatgtatacatcccatccaaatggaggcaaagttcattgctttccacgtccgtttttcctgtcccaaaggcaccagatcttcattgctcagcctgttggattgctgctgactctcttttaatttcatagccggctcccctttccatattgtctatatgtcgtcacacgttatgttttttgacattagatgtcacttaatataactgaagagtcagacaataacactggctatgatatacaattttcccgtttgtatttgaacaacttaaacaagaaaaagagacagacctcagagcccgtctctttcttaagatgcagttttcattaatgcagcaaatctcacagccattaacaggcttgctccgcccgctataatcataatgattcccatcatatcaaaatgggctgccgtgatttctttaccaaaaagaatgccaaggatcaccgaagacaaaatcgatcctaggtaacggcaggtttgaaacaggcctgaagtcgttcctaccatgttggaaggactcgtttccagcatcgctgcctgaagcgcgacattgcccagtccgtagcctatacccaagagcgacagaatgaggcctttaccgatggtctggacattgataaaaaagatggttaagagcacggctccagccgtcatcaaaagcgctcccgcaaagatcggcttgacgacaccagatcggtcgatccatttgccggttagaggtgacacaacgatgctcattccagacataaacagcataaacaggccgctcgtttgaacagaaagatgcatttcatcctgaaagtaacttggcaaaccaaaaaataaacaatagaagaaaacattcaataaaataaactgaacatacacggctgacaggtttcgctgtgttttaaacagacggacatcaataaacggcttatccgttttcagctcgcgccagacaaacgcacagagcagaagcaagccaagcacaccttcaaccgcatgcggcgacgtgctgaacgacagcaaaaaggatagaaggaaaatgattcccccggcaaataaaacaattccaagaatatcgagctgccgaataatggttttgattcctgccccttttttctgatctttcgggaacatatacaggcccaataagaagctgaggataataaacggcaaattaacgataaagatcgccggccagcctccccatacaatcaaaaacccgccgactgtcggccccagcgccgtcatggcggacgcaaaaatagagagtacagccaaggctgaagcttggcgctcatgaatatgattccgaatcaagccgacacctgacggataaatcgcactgctccccaccgattgaaacagccgcatgaccaataatgtcataaacgtcggcgcaaacggcgccccgatggcagaaaccgcaacaagaataagcccgaataaaaacaagcgtttccgcccaatcaaatcaccgagctttcccgttacgggctgcgctacggcactcgccaagtaaaacgaggaaatcagccaggaaaccgttgtaaacgagaggtgaaactcatgctggatgctatggagcgcaagagagatcatagacgagttcagcggattcagcattgttcccgaagccacagctgttaaaaaaacagctcggctttttttcgataacatcatttcacttgttccagaaactcttccgttgtccgcgatttaccgattctcgggaaaataaagcgcagtgtggcttcatgctcttcatcgctaaatgtggacatggcatctgtaataaaaatctgctgatagccaagctgaaatgcctcccgtgctgtgctttccaccccgatattcgttgcgatgccgcacaatacaatcgtatcaatgccgcgacgtctcagctgcaagtctaaatctgtgccaaaaaaagcaccccattgccgttttgtcacagtataatcgccatcctgcacaccgatttccggaacaaattcggcccagtccgccggcatttcccctgaacctccctgcgcaggctcatccgtttgcggcttcagggcgtccgctccatcatgaaaggctacatttacaaagctgatgaacccgttatgtttccgaaattcatctacgagctttttcacgttcgggacaacctggccgctttgatcaatcggcacaatccccttttgtaaatcaatgataaccaatgctgttttttgaaaatcaatgttgagtgtattcatcatacgtctcctcctgatactgttagtgtttctcacattgcatattttactcttcacactgcctaagttcttttatgatgcttgtgaaattctcagaaggagcgttttctcatgatttttcttttatgtaatagtaacaggttgtgcatacgaacaaaccggcaagcacagtaatcataaggggcgtcatcacttcatcacctgcctgctgtctatcggttcctgcctgaaaatgcccatgaatttgcggcggtccatccaaagcaggataagacacataaccattaatatcgtgctaagatcctgcacgccaatgtcaaaacaatagttaatcaagacgatgttcacaataatgggcataaaaataaccgcccctaatgcagccgttcgcggaatcagtaataaaacagctgccaggatttcaccaaaacctataaacagttcatagacatgagaataaccgaaaaatgtccacgcgatcgtaaaccccttcccggcagccgcctcgatttcaggcgtcacctcgccaaactggccaattaccactttcgccagaccgtacacgaaaaaattaaaggctaaaaacaatcggaacgtcgcgggaatcgacttgcgtaccgctttcctcagcctgccgcctttcttcatcatacatccccctcagtgtattatttgatatagtacacttaatacagtatatagtattctaattaatgtcaattcccttttcagctcatatgaatagctgcttttatagatacaaagtcttatatcgtaaaaaatgtcgttctcctttctttccgtccctcgataacatttcttaaaaaccatgttaggaaatcttacacgaaaatgttttatcattcttttttctctataatgaagaaatataataattgctttttattctgaaagatacggaggaatgagacatgcaaatgggcgatacagtttttatgttcttttgcgctttactcgtgtggctgatgaccccgggattagcgttattttatggaggaatggtaaagagcaaaaatgtgctgagcactgccatgcacagtttctcttccattgccatcgtttccatcgtttgggtgctgttcggatatacacttgccttcgcaccaggcaattcaatcatcggcgggctggagtgggccggcctcaaaggggtcggatttgatccgggagaatacagcgataccatcccccactcgttatttatgatgttccaaatgacgttcgccgttctgactacagcgattatttccggggctttcgcagagcggatgcgattcggcgcttttcttttattctcggttttatgggcctctttggtttacacacccgtagcgcactgggtatggggcggcggctggatcggccagcttggagcgctcgattttgctggcggcaatgttgttcatatttcctccggtgtggcaggacttgttcttgccattgtgctcggcaaacggaaagacggtacagcgtcttctccgcataacctcatttacaccttcttaggaggagctttgatttggttcggctggttcggctttaacgtcggcagcgctttgactttagatggtgtagccatgtacgcgttcatcaacacaaacaccgcggctgcagccgggatcgccggctggatcttagtagaatggattattaacaaaaaaccgacaatgctcggagcggtatctggcgcaatcgccgggcttgtcgccattacgccggctgccggatttgtcacaccgttcgcttctattattatcggcatcatcggcggggcagtttgtttctggggagtattctcgcttaaaaagaaattcggatacgacgacgcgcttgacgcctttggcctgcacgggatcggcggcacatggggcggaatcgcaacaggattattcgcaacaacctctgttaactcagcgggcgcagatgggttattttacggtgatgcaagcttaatctggaaacaaatcgtcgccatcgccgccacttatgtttttgtatttattgtcactttcgttattattaaaattgtaagcctcttccttccccttcgcgcaactgaagaagaagagtcacttgggcttgacttaacgatgcacggggaaaaagcatatcaagattctatgtgaggagtgacgctatgagcggtcaaatgttcaaggtagaaattgtaacgcgtccggcaaattttgaaaagctgaagcaggaactcggaaaaatcggagtgacctctctgactttctccaatgtacacggctgcggccttcaaaaagcacatacggagctctatcgaggggtaaaaatagaaagcaatgtatacgagcgtttaaaaatagaaattgtggtcagcaaggttcctgttgatcaagtgacagagaccgctaaaagggtgctgaaaacgggatcacctggtgacggtaaaatatttgtctatgaaatcagcaatacgatcaacatccgcacaggcgaagaaggacctgaagcactttaatatcggtacgagattcggacactccggatctctttttttgtgcacagaatcccccccagaaaccgcgattcctcttcgaattctcttcaagcgccgttatttcagacaatctctatttttatttgaaacttttcatgagtaagattagtctactaaatataaaaatgtaaaaggtgattatttgaactacgaaatttttaaagcaatccatggactatctcatcacaattcagttctcgattccattatggtcttcatcacggaatatgccattgtcgcctatgcccttatcctattggcaatctggctgttcgggaacacacaaagcagaaaacatgtgctatacgcaggcatcacaggaattgcaggccttgtgatcaactatttgattacgcttgtttatgtcgaaccgcgcccgttcgttgcgcatacagtgcatacactgattccgcatgctgcggatgcttcatttccaagtgaccacacgacaggtgcattagcgatttctattgcgatgcttttcagaaaccgcaaaatcggctggccgcttgtcatttttgggcttttgacaggcttttcgagaatttgggtgggacatcactatccggtagatgtattgggcagcctcgttgtcgccatcattatcgggttccttttctttagattttcagatctgcttcgcccgttcgtcgatttggtcgtgaggatctacgaagccattatcaataaactgacgaaaaaaccaaccgatcaaaatttctaagaaagacaaaagccggcgtctgaaatcaagacagccggctttaatatttctcatacatctcttgttttcttcgcttcgccaacacatataaaccataaaacaacccaattccaacagcatcgatgagcacatcccggatacaaccattcctgctgaagaagagctgaagaacttctgtgaaaaaagcaaacgcaaatgagccggctgcagctgatcttatgctgccccgctgtttccacagcaaatatgtcagcacaaagaaggaaaacgcgtgtccgattttttgaataaacgcttcaggtacagtaagctcagtaaaatccataactaaaaattgagacagatcagggtgcggctgaaaatgaaaagccaccgtttgcgatacgaccatgccgctgaagctttccgtacagacagaaagcaggataaaaaagatccagcctgcgagcaataggcggttcatgacataacctcctttataacgtacgtgcctacatgtaactacatagacggtaaaacaaagcaaaaagtaacagaaaaaaacgcccatcacaaggatagacgttttcttcattaagactgttcagtgtcttctgttgtgctgctttctttagaaccagatttgtcagttgaatcatcctttttctcaccggatttttcttctgttcctttttcagttgatccgtcctttttctcggaagattgctgaatggattcttctgtttcttgggtggcagctttttcttcagcagctgctgctttttcaatagaagaaactggtttgtccataaagtttaacggattcattgcaaccccatctttacggatttcaaagtgcacgtggtttccgctgtcttcactgtaaaggttcttgccagattttccgatcacttgattttgttttactttgtcaccttgctcaacgcttacttcggaaagagattgatacacagtcgataaaccgtcggcatgttctacttccacaacatatcccagcactggatctttttcagctttaacaaccgtaccgctcagagaagcagagacatcgaaatcttttccgtctttctcagctaagtcaattcctttgcttaggctgtacgtgttattataggtaacgagtgctgcttctttctcttcttttgcggcatcggtttcatagaactttttcacaacagaaacgttttcagaatcaacaaccggcattgcgacattttccattgactttcctacttcaactgcatcgtcgttgttgtcatatgcggagtttccgccgttatcagccaactgatcctttacctcatcatttgatactgattgataccaaaggacagctgttaaaatgacggccgcactgactaagtaaattgcagggaacacccagcgtttacgaaaaaactgctgaagttttttgacttgagaagttttcttttcttcctctctcattgtttcatcacctcagcaacattctgaacacttttctgaaaatatatacaacctatccaaaaaaacttttttagatgtagtttgcacagactgaacgaaaatatgtatttttttgagaggagtgccaaaaacgtatgaacatgacattgcgtcttgctgaacatagagacttggaggctgttgtggcgatttataattcaacgattgcttctcgaatggtaacagccgataccgaaccggtaactcctgaagaccggatggaatggttttcgggacatacagagtcacgtccgctctatgtggccgaggatgaaaacggaaacgtcgctgcctggatcagctttgaaacattttatggaaggccagcctataataaaacagcggaagtcagcatatacattgacgaagcatgccgcggcaaaggtgttggatcatatttgcttcaagaagcgctccgcattgccccgaatcttggcatccgctcacttatggccttcattttcgggcataataaaccaagcctgaagctgtttgaaaagcacgggtttgcagaatggggactattccccggcatcgccgaaatggacgggaaaagatacgatttaaaaattttagggagagagctttcatgattagtctggataaagatgaaaacgaaattgaacatcataatgaagaaaatagccttgttgaacaggagactgcacctgttggacaggagagccgccagctgagcgcctccgctgtcaagtcgctatccgacattgccaagtggggcaaaatttctggcatcttgttaatcattatgggatcgcttgtcactctgtctgttttgatgacagtgattggcgccatcccgggcgtgctgctcattatatcaggcgtatttttgatgcgctcagcaaaagcagccgcggaagccgaaggaaatctagccggcagcgctggcgaaagcatgcttgaaaattacgggacatttataaaaatgcagctgttttatgcagcatccagtatcgttactgtcctgatcgggatcattgtagccattttcgtgctggtggtaatcggcattgctgcttttgagaacacgccttcgtatgatgatccggattcttattattatgaggatgatccggtgtttgaataatgatgagacaggacagggcatgagttccatataaacggaaccatgcctattttatttgactattcaaagcaggccggcgtaaacaccaaatcctgaagcaagtacaatagacatctctagtagaagaaatcaacaaagcaacgctgttacccagaaataaataacaaaaaaactacctatgaggtcggaatctatctgaaaccgcgctttttatttcgggtgtctgcatgcaaaaaaacacacccggatcgtctggaaaatctcaacaatccgggtgcagatcttctttaatacatttttttgcgtctgtcttcctcagtcaaaaattcaacaaaactccgcatcgcaaaaggctcttcctttatttgccgtgcgtaggagcttttccgctcttctgaaaggatttcgctctttttgatcctgttcagcatatagatgtgaactgttttttggatttgtttatgctgatagcctgcctctttaaaaaatgcgagcccgagcgccgccaaaagagcgaatatgcctgcgctgatcagggactccctgtcagctgaagcatgaaatagaaaagcagctaaattaaagagagagaatgcagcaagcggaatagcaagaaaacggtaaatgacggtttttttcatgaaaggctgtacggccttttgaattttttgcatttctgttttgatgaaccccggcatttgttcgactctgtaaaagttcatataatcctccccctttatttgatgtttcaagcttcacgaacgttacatatgtgtttattttaacgcaggtgcaagctggttttaaagaaatctgcccgtatttttcacgaagaatctggatcgccgctctttattcttttaaaatgtgagtgttataatttgtaatgggaatcagatcactgttattcatggaatactaatggcaatcttcttgataaatatgaatgagcggggttacaaagtgagtatttcttccatccttttatcactttttttcattttaaatattcttttggccatcattgtcatcttcaaagaacggcgcgatgccagtgcatcttgggcgtggctgcttgttcttttctttattcccgttttaggctttattttatacttattattcggccataatctcagacgcaagcatttgtttcaatgggaagaccggaaaaagattggaattgaaaggctgctgaagcatcagcttgaagatttagaaaccaagcaatttcagtttaacaaccgggcaacctttgataacaaagatttaatttatatgctgattatgaataaccatgctgtgtttacagaggataattcagttgacgtcattacagatggacgggataaatttcagcggctgctgagtgacatttcaaaggctaaggatcatatccatttacagtattatatttataaaggcgatgaattaggcaaaaaattgcgggacgctctcatccaaaaggcgaaagaaggtgttcaggtcagagtgctttatgatgaactcgggtccagaacgctgagaaaaaagttttttaaagagcttcgcgaggctggcgggcatgtggaggtctttttcccgtcaaagctcaggccgattaacctgcggctgaattaccggaaccatcgaaagcttgtgatcatagacggtatgaccggttatgtcggaggctttaacgtcggagatgagtatctagggcttaatccgaaattcggttattggcgggatacgcatatccggctgcaaggaacggccgtacacgccatccaaacacggttcatccttgactggaaccaagcttctcatcaccatacgctgacatatattccaaatcactttcctgattacggcccaaaaggcaacgtcgggatgcagattgtcacaagcggccctgattcggaatgggaacaaattaaaaatggctacatcaaaatgatttcgaacgccaagcgttccattttgatacaaacaccttattttatcccagatgcaagcctgctggatgctttaaggatcgcttgcctttcgggcattgacgttaacattatgattccgaacaagcccgatcatgcctttgtatactgggcaacactttcgtatatcggcgatctgctgaaagccggagccactgtctatatttacgataacggctttattcacgcgaaaaccatcgtggtggatgacgaaatcgcttcagtcggcacagcgaacattgatgtccgaagcttcaggctgaattttgaggttaatgcatttatatacgatatcaccattgctaaaaaactggtttcaacttttaaagaagatttgctagtatccagaaaattcacctatgaggagtatctgcagcgcccgttgtggattcgaataaaagaatccgtctcgcggctgttgtcgccgatcttataagatgtgcaaacccccggcctttacggccgggggttttcctgatggtcacagtaaatgatgatcgcctcccgcaaaaaagcggcaagaccttctccatattgattgattgaatcggtaaatcgctcgtcagtgatatacacttccccgagtcctctgaaaatgtcgagtgtgcaatcgtaatgatattggcaaatatgatcgcgaaatgcccccactgcggcctgaacctctgcatcatcgggcccatgcttcattcgcgccgcaattcgtctgtaaatcgaatcaaattcagccatgatcgagcgccaatcatctgccgagtatgcagatgtccttttctctgtttcttctgcgatttccttaccatacagctttctgacttcgtcagcgtatgtctgctgatgctcttcaatgtctttcatgcttaatccggcaaataaatccctcttattcatcgtttcccctccatcaacggacaaaagcgtcctgtcaattgtttgaatcatctcatccattctttgttttttcttcatcaatatctccttttgcgactgaagtgccgctttccggtcaaaattcggatgatccagcatctccttaatctcatccagacgaaacccgatttccttgaaaaataaaatctgctgcagtctttccaggtctgcgtcactgtacaaacgatacccagcatcagtaagcgctgaaggattcagaagctcaatattgtcatagtgatggagcgtccgaatgctaacacctgatatctccgccacttgtttaacttgatatttcatacataacacctcctcttttttatcgtaaacaatcacgcaacgttagggtcaatccccaaaatgttattttctatatacaaaacttctcacaaatagtgtataaaagaaaagtgagtatttttttgtaaaggggagccagtatacatgaatcctgaaacaatgaacaaaaccctcatcagcatttcgaaatggggaaaagctacaggcattttatttattattatgggcgcaattaccgcgctttcaggcgcgttcttttttctaatcggtgccgtgccaggcgtactgcaaattatttccggtatctttttgatgaggtcagctagggaagcaggccaaatggctgaacacaatagcggacagtctgaagacttaatgctggagaattacgcgaaattcgtaaagatgcaagggatttatttgatcgtaagcattgctgtatccattcttgcgattatcgccttcttcatctttttaatgcttgggattgctgacggccttttcagcgatacgtacagcacttattaatgagaaaaacccggagctggctccgggttttttattattccgcttcgcttaccactgtgaagcgttcatttttgtgttcgggatgttcaagctcgtccaacacggcaatggcataatctgcatagctgatatagctgtcgccttttgcatttacgatgacattgtcttttcctttttggtaagagccagtccgttttcctgctggatcaaaaaatgctgcaggactgaggaacgtccaggaaatgaagtctgtctgctgcaaatctttcaggttctctccttgatttgatgcagttggcaaatattctttcggaaattccggcgtatccattaaacgggttgttttggcttcatcaacaaacaggcttcccgctccgccaacaacaagcaatcttgtgcgcttcgcgtcctttaagatgttgatgagtgctcttcctgcttcaacatgaagatgttcttggccgggtgctgctccaaaagcgtttacgactgcgtcgaaaggcttgatgtcttccgcagtcagttcaaacacatctttttccaaaaccgctacgtcctgcccctgcacttttgaagcgtttctgacgatggctgtcacttcatggcctcttgttttcgcttctttcaaaatttcgtttcccgctttcccgcttgcgcctataataccaattttcatttttcatttcctccttatttgtaacaattttagttacatgttagcggtgagaagtcatcccttttgattaaaagagatgattcataacatcttttaatgacttgcttgccagttcattttccatcgctctttgcacactttcaaacgtttcatccagagcgttctgaatttttttccctaccggacatttcggattcgggttttcatgaaccgcaaagagttcttcttgcttttggacagcccggtacacttctaaaagagaaatatcagcaggatcttttttgaggcttgcacccggcacccctgcgcgtgatgtgagaatatcagcttttttcagcaggctgatcattcttcgcacaactaccggatttgtgttgacactgtcagcaatgatttctgaagatgttttttcatccatcgagatgagggataaaatatgaatggcaacagcaagacggctgttaatcatgttttttcaccaccgttgtaactataatagttacatttgattcgtttgtcaacatctaatatacactaaatacacgggttttgtgcaccgtttttagtcaatagaacggccggatgcactccggccgcgtcttatcaaaataagaaatatctttgtccaagtgggacataatcgacaggctggcaagacaattcctccccgtcagcaaagacctgataggtttttggatcaatctcaatctttggcaaagccgaattcagcttcatatccagcttgctcagctttctgatatttttgactggagaaatccttttttccagccctaagctttctgccacaccacgctctatgcttgcctgagacataaatgtaatcgaggttgagcggttggcttttccgtaagacgcatacatttggcgcatgaaaaccggttcaggagtcgggatggacgcgttcggatctcccatttgcgcacgtgcaatcatgccgccctttaagaccagttccggtttcacgccgaaaaataccgggtcccacagaacgagatcagcaagcttccctttttccaccgagccgacctcatggctgagcccgtgcgtaattgccggattaatcgtgtatttggcaatgtaccgttttgcgcgcacattgtcattcccgttttcaccggcaagagcgccgcgctgttttttcattttatcggctacctgccatgttcggatgatcacttcaccgacccgccccatcgcttgggaatccgatgatgtcatgctgatcgcacctatatcatggagaatatcctccgcggcaatcgtcgccgccctgattctggaatggctgaatgccacatcttcaggcactttcgcatctaaatggtggcagaccatcatcatgtcaagatgctcatccatcgtattaacggtataaggaatggttggcgttgtagatgacggcagaatgttcgcgtaagaggcgagcttcataatatccggagcgtggccgccgcctgccccttcaatgtgataagtatgaataacccggtccccgatcgcgtcgagcgtgttttccaaaaagcccgcttcgttaatcgtatcggtatggatggcaacttgaatatcagcctcgtccacgacttccatacacgttttaatggcgcttggcgtcgtgccccagtcttcatggagcttaaggccgatggcgcctgcttccacctgctcgatcagcggcgctttatcggatgcattcccttttcctaagaagccgacattgatcggaaactcctcggccgcttccagcatcctcgccatataccacgccccggacgtacatgttgtcgctttgcttcctgtagcgggtcctgttccgcctcccaaaagggtcgtcacacctgaagaaagcgcaacttccatctgctgaggacaaataaaatgaatgtgcgtgtccactcccccggctgttaaaattttgccttcaccggaaatcacctctgtccccgctccgatgaccatgtgtggatcgactccatccatgatatcaggatttccgctttttccgacaccgacaatccggccgtctttcacaccgacatccgctttgacaatgcctgtgtaatccaatagcacgacgttggtgataactaaatccaaagcgccgtccttccctgtgattctgccgttttggcccatgccgtcgcggattgtttttccgccgccaaagatcatttcttcaccatatactgtgaaatccttttcgacttcgatccataaatccgtgtcgcccaatctgattttatcgcccgttgtcgggccaaacagttccgcatattcctcccgtgacattttcatcggattacaccctccatccagccggcttgttttaagttggccaacgttttttctttgccgcgttcatcgataaacgtgtcggccattccgttcagccctttaattgtcttgcgtcctctgatttccactagtgagaccgttttctgctctcccggctcaaaacggaccgacgtgcctgatggaacatcaagacgcatgccgatcgccagctcacggtcaaataataaagccccgttggcctccgcaaaatgaaaatgcgaaccgacttgaatggagcgtgatccggtgttttttaccgttacctcccgtatctcacgcccttcattaatcgtaatggttccctcagcaatttgaaatgctcccggcttcatgacttcacctccgcagaaattggctgatgtaccgtaacaagctttactccatccggaaatgtggcctccacctgaatgctgtccagcatctcaggcacaccctccatcacatctttttccgttaatacatggcggccggcttccatcagctctgctactcccttcccatcacgtgcgccttccataataaagcaggtgatataagcagcagcctcaggatagttcagcagaacgccccgcgcctttcgctgtttggctaattcccccgctgcaaaaatgagcaatttctcttgttcaactggtgtcagtttcatctgtagtcctccttcttttgtcatataaagcagatgcggctactacgaatttgcggaacagtcaggcgggacatcacctccctttcttcgggaatgggggtcatacggtaagatgcctttcaaagcggcatgccgtttcttcatcagccttgccatggtcaacaaccgttcccctgtcgatcacggaaagatcagattaacgcgttttccagactgcgctcgactaagataacaaatgtctttttttctggaaatttctataataacttgtctgactagttcgacaattaaaatctgaattccttccaattgtttattaagtaaaatatttttcagatttaccatcagcgctctggcgattgcaagctgctgctgttggccgccttttcgctttgaacaaacgtttgattaaaataaatagcccccctgtttagccggaagcaggcctatggagtggatggccgactccatttcggcctaatacagcgacaatctgccccgggcgaagctaaggctgtgcaaaaccatcgattgatcataaccagacgttacattcctgatggcagcccgttgttttgctccgcaaccggaagtatggcatggaggccagtctgaggcgccgacctccacgataccgagaacccaactattgccattaactccgcatcatggacggtcacttcgctgatcgccaccgttcctcttaatgagtgaagaattccggccttcactgaatccccgcttgtgtcgatatcaactgttttctcgcactcccgtggcttccgacactttcttcggtgcagtacattcagccatcaaaacccctttgtttgatttcttcaaatgatgttataaaagtttacaacttatgtcatcattatatagaagaggcctattaattcaaagaatatttaaaaaatttagttaccttgaccaaatcagcttctttttttgttatatttattcacatcagaaaaagcgaaaaaaaaagacaagaaacatttcgtttcctgcctcttccgtacgattaatctttatctgaaaatttatccttggctttcccgatatccttttggatttcgccttttgccttatcttttttgccttcagcctgcatgtccgttctgtcagccatatctccgactttatccttcacttctcctttggctttattgaagccgcccttcattttgtcttttacactatcgttacccatgttaattctcccctctcaattatgtgtgtacttgttaacttcccgatctgagaggcaataaacattctaatgttatttatcgatttcgtagcgctctccgtaacggagcaccttgtatatcgccagcccgtctgatgactttttctccgaatatcggaccggcagcagggcaaaaaacacataatacgtagaaaaatagacaaactgatagaaaaacacattcggctttaatacactgtgtataatcagcagattgattgcaaaaatcgtgatgaggttaaacaagcagcctcctgcatacacgagtgcatttgagaatcgattgtcaattttcaactccccgtaccggcaaaaagaatcgataaaataaatcgttctgaaccgtatgggtccaattttaagcagcgtttttcccatgcctatatccaacgatccctttccgccaaaaataaaagccataaagctgtgccctgaaacatgtataatctgtacaagcggcagaacaatgaggaaagaccacagaaacttcaccatatcattaaaaccaaacattgaattccccctcacatgcatatctgcatcccaaaacggcttttgttcaaaaaacagtgctgtagcgatttttcctgttctccccggaaataaacgttccgatgctcccctttttttgcataaaaaaaaaccatctgccagcagatggttttgtctcatacttcatataaacaatcgttcctttgaatcatctctctcatgctgaccgctttttcataaaaatacaccgcttctttatattgttcgcgatgactgaaataagaggcagcatctaaagcaaattcttcaatatatacatacaggcccttttcttccatataatcaaatacttcttgaatcatatccaaattgacagattccacatataatgcctgcagaaatttatattttgccagactgaagaagtcgtttcgtttttgggcaatggcaatccctttttcatagtaccgtatcgcggcttcgctatcttgttttttgaaaagaacgcgagtcaggctgaagagcgcttttggaagctgttccagctgataatcctcgaagacaggaagcgctttttcaaagtattcggcggcctgatccagctcccccttgtcatcatagcaattcccgatattataaagggctgatccgatcaaacggggctgtccttccaataaagcaaggcgatacgcgtcatccaaatgctcaagcgctttttcataatttctgtagtctatgtagtttcctgatatgacgaaatggcattgaattcttctgactctataaaaatcgtgagccttatacgtctccagcgcctgtacagcgtggttcatagaaaagtgcgtctgcttcataatataaaagacttccgccactttaaaatgaaattccgctctttcaatttcatcttctacaaacgcaagcatcttctcagctttccgataaaaggatatagccgagatgtaattgttctgttcaaattcgtacattcctctaaacaagtgaaaataatactcagataatccggagatgctgtcctgattgctttccagcgttttgatcaattcacgatattgaagctgagattcctcgtgcaggtcaggctttacgtaatccagcataatttggtgccggtagctgatcagctgataatacaggagaagcagctgatcctcttccatctgttcgatatctagatcaatttcttctttcagctttacggcatcagccacttgaaatgctaaaatgtgcttataccacttattgattttcactcctacttgagatgacgggatctcgtacgcggccatgcccctccaaccctttctattttctaattggttatattttatcataatgtatggctttggaattaaattttcttacaatgattccttctttatgcctatccttatatatttcggtttttctacgtattttttgcactcggattctaataaaaaagcttaccggacagtgccgataagcttttgacttcaaattaaccgccaatataagacatttccactttctttttgccagatgcttttgatagcgtacgatcgactgaatactgatcgatccgatttttccatactgtcccgatcatttctgatagttcgtcatcacttaattcctggcgaaccggagctctgaggtcaaatccgcttgaagcgaataagcaggtaaacagctctcctctcgcagaaagacgggctctgttgcaagatccgcagaacgcatcagatacagatgatatgacgccgatttctccggagccgtccaagtagcggaatctggaagccacttcgcctatataattaggcgctatcggctcaaccggcatgtgttcattgatcaaatctatgatttccgcctttgtcatgacgtcttttttttcccattggttggtgttgcctacgtccataaattcaatgaatctcaggatatgccctttttctttaaaataacgggccataggcagtatatctttttcattgacgcccttttgaacgaccatattgattttaacaccgagccccgcttgcttcgccgcttcaatgccttccagcaccttgctgacagaaacaccgcgcccgtttatcttcttaaaacgctcgtcttctaaagaatcaaggctgatcgtaacccttttcagcccagcctccttgagcctcttagcataaacaggcagcagtgatccgtttgtcgtcatcgcgatgtcacgaatacccggtatgcgggccagttttttgattaattccggcatatcctttctcatgaggggctctccgccggtcaagcggattttttcaacgccaaatcttgtgacaaacaatgtcgcaagccgttccagctcctcaaatgaaagcagctcctctttctttaaaaaaggataatccgggccgaataattcggcgggcatacagtacgtgcatcggaagttgcagcggtctgtaacagaaatgcgaaggtctctcagcggtctgtttcttttatccaacatctgacgcgactctgtaatcatagctacagccccttcctactccctgattctctcagggtgtgtatatacattaaatgatccgtttctgacaaatccaatcgctgtgatattcaattcttcagccatttgaatcgcaagctccgtcggggccgatttggaaatgacaatcgacacgccgattttggccgcttttaacaggacctctgatgagattctgccgctgaacacaatcagtttgtcgcgtacggacatcccgtttagaaggcagtgcccgtatagtttatcaagtgcgttgtgccgaccgatatcggtgcgcatcaacagaagcttctctgtgtcgcaaagcgccgcattatggacgcctcccgtatcctgaaacgtcccgctcccttgctgcatgtctttcataagcgccagacatgcctcaggcgatatcttgatttggctgacagccgtcttggctgttttgacatcctgctgaaaataaaaatgacggccctttccgcagcatgagccgatcacccgtttcgtataatccttttgatccaatgtctcagggtgaacgaggtcgacatatacaaaaccgagactttcatctattgtaaaccttttaatttctttttgaaatcgtataacaccctctgatgcgagaaatccgatgacaagctcttcgatatgctcaggcgtacaaacgagcgtcacaaattcactgccattcagtatcactgtcaaagggaattccgtcaccatccggtcttctactttgcttatttccccttgttcatagcgccatacatccctgaccgcagttactttatcgttcaatgtctcttcccctccgcaatgttcctgcctttatattttttcacactcctcggattttgtcgaattctgagacacaaaaagagccctctatataaagggctttcacaggatgtgatgacggcggtgtttaggcagggcgcctaccgttccttttataacacgtgagcaccaatgtgcattgacaacaaacgcggggtttgtcgacacgctgagagccctctatagaaaggactctatggttgattatactgattcttttttagaaccgtaaacagcacaatagctgcgatcaaggtgagaatgctgacaaaaaagaaggctgccagttttagaagaacaccaagcaatatgaatgcaacggtggctataagaaaaatcattccgaataatttcatatgttcaacccctttttagggtatcattcccgcccaaactgtttttaaaccaataaaaaaaggcgcctgggggagcgcctgatctttaggttccttactcagtaaatttttgtgcttctttttcccaagcctgttcgaactcatccgcactgttcgctgaaatatattctccgccgccagcgacagctgcttgtttcatctcttcattacccttgacatcaaagttgaagccaatgatgtttacaatcgtatccacatttgatgcacggagcttttcgatttctgccgcagggtctccgccgcacgtttcttcaccgtcagtgattaaatacaccacgtttttcccgtctgcgtcaaatgcctcaaattcttttcttgtgtctgcaagtgctttggcaatcggtgtccatccagtcggcttgagctcactcaatgaattgtcaaacagggatccttcatatggatgaaggccgtaaatagtttccgtcgtactgcacgaaagggctttaccggacagtttattattccctgcatgcccgaaaacgcgaagcataagatttgtatccttcggaagaagttcggcaaaagattttactgattttttggcaatgtctattttgcgctctcctcctgttttttgaaccatacttccgcttccgtcaaacaaaacagctacatttgtatcagcctgtttctcagcggcaaaagacggggaggcaatggaaacagtcaacaatccaatgataccggcagccagcaattttttcatatgattacttcctttctttttcatattttccaactatatgttggattcttctttatgctagaatacgaaaatgcaaaaagatataggacatgctgccttttgtgctgctttcacgatctgtccaaaatcgcttgaaatgccgttcatttttagccatttccgcccagaaagcataaacagattgtgtgatcattcattcttttttcgccttgattatgacagaaaaacggaaatctgctactatgctacaggcagacagctaattagttttgaagtttttgttacatacaaaaagaggctgaccatcaccagcctcttttttcttatttagataacattagtgattgctgagtgaaaattttctcaacatctttttgggtataagccgggaagtattcaccgccgcctactttcgcaattgcgttcagctggcctttgtatccctctttataatcaaagccgatcacattaacagtgatattgtctttttgcagttcctttgctgttttaatcgggtttcctccgcacgtttcctcaccgtctgtcaacagatacaccactttttccccttttgcatcaagctggtcaaaagaagatttcgcctcgttcagcgctttggcaattggcgtccagccagtcggcccaattgtattgagagaattgaggaagctttgctcgttaaagctttggaagccgtatacgttgcgaatggcttcacatgactgaacttttccggaatttttattgtttccttcagagccaaacacgctcattttcacctgagttccttctggcagtgagctcgcaaactttgaaatttcttttttggctgaattaaatttagatacaccgtctattcttttcgccatacttccgctggcatcaagcaagaccgccacgttcgccggcgctttagcctccgtttctgacttttcagctgcaaaagcaggtgaagttaatccaaaaagcaatcctgtcatcatgatcagtgaaaatcttttcttcatgttcgtacccctttaccaatttgtttctgcgtgcagatgttcaacgctgaacataatctatcgtaatcaacaaaaaccgagaaataaatagggcgggcttccccattgctgttgtttacttttgcatagaaacctatgtttttattagtgatttccacctaacgcccctatgaaaagagaagattgtccgcctttcggctttcgttatatgagtctgtcgaagtctgtcgacaaatgtggatgactttaccacaatctcaaagcctgaaatcaggaaaaaaggactgatccttaaagacggccagaagctcctctaaaccgtttcagccgctcttagataaaagacattcaagaacagaaaaagacgcccaaagagcgtctttttctactttttcgccatgtatttattcaaaaacgcatctgcctcagaaatttgtgtgccttggtaatagtactttacaatgtcatcaaccgttttgccttctttggccataaaattcgctccgtattggctcatcccaacaccgtggccaaatcctctcgtcgtgactgtaattgtgtctccatttcgcttccattcaaaatcggcggagttgagacccagcttttcacgtatgtctcttcctttcagcgtcttgccgttaatgacggcagttgcgacctggtggcccggtgtctcgccggtaatcttccctactgcgctagatccatccagcttgacgccaagcttttgctgaaattctgccgctgtaaaggttttcgttgccttatatttcggagactttttatcccatgggcttttgacgctttttaaatatgggatagcacttgtccaataagcttctgcattctctgtgtagccgttgcttgtggagaaaaaggatgcttcaatcggctggttgttgtacgttaagattttgccttgcgtactggctaccgcagctgtgattttcttcagttttgtctcatagcttgtgccccactgttttttcagctccgctttgtttttatacacctggaacatctgtgtatcatccaccagtgagcctttaggagcctcaaccgctgaatttgacaccatcagtctgacaataaatgttctggcggcgagggcctgggctttcagtgcttcagattcaaaggttgccggcatttcggaggcgacgactccaatcacatactcttcaagcggaatgttttctacggattgatttgcggttcgatagacgggaatagaaacaggtgatgctttcaatgtttctgctcctttcgatgctggtttcgtgctgactgctgtcttttctgattctacactggcccccgcttccttattatgctggaatggtataaccaagagtgtgggaaccaagagaatcaatgcacatagtacggatagtgtgattgcgaattgtttcatattcagctgcctcctgctcgggattcgactctagtctagtctatgggcagggacaagctaatatgactctcgttttggacagaaactttatttgtcatttacgtattcttttttgctattttgcgcataatgatgataatacacaaaaaataaaaaaccagtatgccagagtgacatactgattttcaagtaagtttatgcatttaagtcagaaacgacttctttattctcttgctcagaagcagactcatcatttacacgttcgatgtctgcgcccagagcggcaagcttctgatggaaatcaacgtaaccgcggtctaagtgcttcaattcagtaacacgtgtgtgaccttcagccactaaccccgcaagaatcagcgctgcacctgcacgcaaatcagtcgctgcaacttcagctccctgaagctgtacaggaccgttaatgatgacagaacgtccttcaatcttgatatcaccattcatacggcggaattcttccgcatgcataaaacggttttcaaaaacggtttctgtaatcatgcttgtgccgcttgcacgaagcagaagcgccatcatttgtgactgcatatcagtcgggaagcccgggtgaggcattgttttgatgtcaatcggtttaagctctttcgggccgatgacacgcagaccttcaccttcatccttaattgttacacccatctcttccatttttgcaattaaagaggtgaggtgttcaggaaccgctccttttactaatacgtttccttcagtgattgcagcagcaaccataaatgtgcccgcttcaatacggtctggaataatatggtgttttacgccgtgaagcttttcgactccttcaattttgatggtgccggtgccagctccgcggatttttccgcccatgccgttgatatagtttgctaaatcaacgatttcgggttcttttgccacgttttccagcgttgttgttccttcagctagagcggctgccataatcaggttctctgtagctcctacacttgggaagtccagataaatttttgcgccttgcagtcggccttttacttcagcttcaatgaagccattaccgactttgatttctgcgcccattgcttcaaaaccttttaaatgctgatcaatcggtctggaaccaattgcgcatccgcccggaagtgcaactcttgcatgacctgtacgcgcaagaagcggccccatgacaagcacagacgcacgcattttacgaacatattcaaaaggtgcttcagtttgcaaagcgtatgaagcatttacagtcacttcattattttcaaaatgcacatctgctcctaaatgacgcaacacttcgttaattgtatatacatcggagagcgtaggtacatcacaaattacgcttttttcttcacttgctaataaagatgcagcgataacaggtaaaacggcatttttagcgccttcaactttgactgtgccgtttaacttctgaccgccgcggacgatgattttttccaaggtattcccctccgcgtccctaaattctctatattaatattcagtcgtaacgattggtgtgccaaccgtaacggtatgttttccgcccattcctgcacttctaagtgcaatttgcaaattcattttatgtttcgaggtcataatgtactcttcccactcatctgtaaacgcagaaatagaaacgaaatttggctcaactacatgttctactgatcttgcttgaaattcatttaataactgatttgcttttttttgcaaaacaatattcatattatcatctaagtgaccatttagacaagtaaaaataactactttttcttggaatatcccaagtgtctcccgttcaaactgttcatatgtatcattccagctatccggtgtctctagactcatttgctcatataataaatacgaagttggattgtgttttttgagggttgtgacaagctgcagtctaaaagaagatcgattttttttgtcagtatatgtgccaattgcctttatcattttatcttcccgtgcaatcacccaatcatattgacgatactctgattttaaacgttgcactttttgataaaattctttttcggtcagtgacatgttttgttttgcatgcaatgtccacttatctattgacacatcttggcgttccatcccctctgccatttgtgctaacggcgttaattcactcgcatgaatggtatggaaaacagcaatgacgaagcttaacatgacggaaatgataatagcgcggcttacttgttttttcttcatgttcatctctcccccttatccccagttttaccggaggcaagaggcgccatacgtaaaaatcttcgtcaaaactcgagctattcgcttcattcaaaacctattaaaatagatagggaagctgctgtgaataattgagataatctaaaaagaaattggcaacggccgttccaatggcaattgtcagcaaaatcatcaggagtcttgcctgcacgactttgccttttttgattaacggatctatattgacggcttgcaacgcccaccaagtcactgctataaaaatcaggtgaacgacaatgccgattgcagcctgctgtcccaatacactcatctattacactcctttctctgcgttcataccctttcttattatataagaagcacagataaagatgatacattttatacagaacggaataatcacccaaatctagggctaatccccgcttaaagtgcgattcttttacatggtatactttattggaaaggagctggcaaatgtgaatcattctttttttcagcctgaaaagcaatatggtgaggacctgccaatttttgatcaggaatgggaagcaattgcattctattatgattatagacagtcacagattgaagaactgaatgaattgtgtcagttttttaacatttctcttacctatacgagagaaagccttgaagagcttgaaaacctctattttcaaagtatacaagaacttttgcttgctgattggaatcttcctattgaagaattcgagaaaatgatcagtgtttatcttatagattgtgtgattgcccgccatgaagatgctgaatgggttgtaaaaccttatccctataaagacggcgcttatacacttggctttagaagacatcgcaaatcgtggcatacaatgaatgcctgtgatggtttatacctgcgtccaaaagaggatcgcccgctgttatcgctgtttgattctcttgtgcgttcataaaaaaatccttctctttatgagaaggattttttcttatttccctgctacatccaatctgttcaaagcccgctgtaacgcaagctcagcccgacgaatgtcagtatcatctgattgagaattcaaacgctcctgcgcccgctggcgtgcagcttcagcgcgctctttatcgatgccttctgctgtctcggcagcctgggcaaggatggtgacctgatcaggacggacttcgacaaatccgccgctgacggcaaccatttcagtctgcccgtcttttttcagacggacagcgccgattttaagaggagccacggttggaatatggcctggcaaaataccgagatcgccgctttcggctctcacactcaccatttcgatatccgcatcgtatactgggccgtcgggagtaacgatattgactttaacggtcttcatgcttttaccctcctaggaccagattaaacttctacacccatttcttttgctttctcaacaacttcttcgatacggcctacaagacggaatgcatcttctggaagatggtcatatttaccggctaagatttctttgaagccttgtaccgtctcttttacaggcacgtaagatcctttttgtccagtgaactgttcagccacgtggaagttctgagaaaggaagaactggatacggcgtgcgcggtgaacgacaagtttgtcttcctcgcctaattcatccataccgagaatcgcaatgatatcctgaagctctttgtaacgctgaagcgttgactgtacttcacgcgcaactgcataatgctcttccccgacaatttcaggagcaagggcgcgtgatgtagatgccaacggatcaaccgcagggtaaatacccatttcagttaatttacgctcaaggtttgttgtcgcatccaagtgagcgaacgttgtcgccggcgccgggtcagtgtagtcatcggcaggcacgtagatcgcctggatagatgtaactgatccaacgttcgtagacgtgatacgctcttggagctgacccatctcagttgcaagcgtcggctgataaccaaccgctgaaggcatacggccaagaagggctgaaacctctgaacccgcttgtgtgaaacggaaaatgttatcgatgaagaacagtacgtcctgtccttgtacatcacggaagtgctcagccattgtaaggcctgtcaaagcaacacgcatacgtgcgcccggcggctcgttcatttgtccgaataccatggctgttttgttgattacgccagagtcactcatttcgtagaaaaggtcgttcccttcacgagtacgctctcctacgccggcgaatacagagataccgccgtgctcttgcgcgatgttgttgattaattcctggattaatacggttttacctacaccggcaccaccgaacaatccgattttaccgcccttaatgtaaggagcaagcaaatcaacaaccttaatacctgtttcaagaatttcaacttctgttgaaagctgatcgaatgaaggcgcctgtctgtgaatcggatcctttttcgcatccgcaggaaccggctcattcaaatcaatattttctccgagaacgttaaatacacgtccaagtgttacatcaccaaccggtactgagattggcgctcctgtatctacagcttccataccgcgctgaacaccatctgtagatgccattgcgattgtacggactgtatcatcacctaaatgaagagcgacctcaagcgttaaatcaatacctacttcgttttcacttgcagctggctgtgaaattttaatcgcattataaatttcaggcaagtgaccgtcttcaaaacgcacgtcgacgaccggtcctaatacctggctaacgcgtcctttcttcatcgctatccctcctgacaaaatctttctattctaaagcggctgctccgccgacaatttccgtaatttcttgtgtgatggctgcttggcgagcgcggttgtaagaaagcgaaagtgaatcgataagttccttcgcgttgtctgtcgcatttttcatcgccgtcattcttgcagcgtgctcacttgctttactgtcaagaagcgcaccgaagattaagctttctgcatattgaggaagcaaaacctccagaacctcctcttcagatggttcaaattcataagacgccgttctttttccgccgccgctgcccaaatcagataacggcagaagttttttctccgttacttcttgagtaatggcgctgacaaaatggttataaacaaggtgcaattcatcaaacgcaccgtctataaacatttgaatcgtttgacgggcaagatctttaatttctgtaaacgttacttcatccccaagtcctgttaactcggaaatgatcggaatctcccgtttcttaaagaaatcacggcccactcttccgatggcaatcaccgcatactcatccttagactgatgacgttcttgcatggcctgataagcactccgtaaaaccgaactgttaaaagcgccggcaagaccgcggtcagacgtaatgacaaggtatgccgtttttttcacttctctgctgagaagcatcgggtgcttcacgttgccggaaactcttccgacgtttgacacaacctcttggattttatccatatatggcacaaatgattttgcattgttttcagcacgattcagcttagccgcagataccatctgcatggcttttgtaatctgacttgtttttttcgttgacgtgatccttgacttaatatcgcgtaatgaggccaaagatttcaccaccttttctcttcatctgcgtaaaaagagagaaaaagagaacctttttctctcatcagcattcgagttagttgcttggtgcaaatgtgcgtttgaagccttcgattgcagcattgaagtcttcatcagcaggaaggtttcctgttttcgcaattccgtcaagcaggtctttatggttttggtcaaggtacatgtagtactcttcttcaaaacgtctgatatccgccacaggaatatcatcgagatatccttttgtcagcgcataaagaatggctacttgcttttcaaccggaagcggcttgttcagatcctgcttcagcacttcaactgtacgcgcaccgcggttcagttttgcctgagtcgcttggtcgaggtcagaaccgaattgagcgaatgcttccagctcacggtatgacgcaaggtcaagacgcaaagtacctgatacttttttcatcgctttgatttgcgctgagccgccgacacgggatacagacaatccggcattgatcgctggacgtacgcctgagaagaacaaatcagattgcaggaagatctgtccgtcggtgatggaaatgacgttcgtcggaatataagcagagatatctccggcttgtgtttctacgaacggcagagctgtaattgatcctgcgcctttcgcgtcgctaagctttgctgcacgctcaagcagacgggaatgaagatagaatacatccccagggaacgcttcacggcctggcggacggcgaagaagcaaggacagctcacggtaagcggccgcttgtttagaaagatcatcgtatacaacaagaacgtgcttgccgttgtacataaattcttctgccattgtaaccccagcatacggtgccaggtacagaagcggtgccggctgtgaggcagacgccgttacaacaattgtataatcaagcgcgccgtgtttacgcaatgtttctactacgccgcggactgttgattctttttggccgatcgcaacatatacgcagatcatgtcttggtctttttggttcaggatcgcatcgatcgcaacagatgttttacctgtttgacggtcaccgatgatcagctcacgctggccgcggccgattggaatcagtgcatcgatcgctttgataccggtttgaagcggttcatgaacggatttacggtccataacgcctggtgcagggctttcaatcggacgagttttgcttgtaaggatcgggccaagtccgtctaccggttggcctagcgggtttacaatacggccgattaactcttcaccaacaggaacctccatgatgcgacctgttctttttacttcgtctccctcacggatctcactgaaaggtcctaagatgacgatacctacgtttgattcttcaaggttttgagccatacccaaaacaccgtttgaaaattcgacaagttcaccggccatacagttgtcaaggccgtgcacacgtgcaataccgtcaccgacttggatgactgtacctacgtcttgaacttcaatatcagattgataattttgtatttgctgttttatcagcgtgctaatctcttcagctttgatgctcacttaggtttcaccccttctatcgattttccccggctaattgacgttcgatgcgctgaagcttcccgcttacgctgccgtcataaatccggtttccaatgcggactttaatgccgcctattaaatccgtctgcacttcatttctgattctcagtgaagcgactccggctttttttgcaaacacttgtgataatggtaacatttctgcatccgtcagcggtttcactgaatatacgattgcgtcttctgtttgacgggccacatttgcgagtttgataaactcatctgtgagctcagggacaatcgcggcacgatggcggtcaatcaaaagaaaaatcgtattgagtacggactgtgacaaagagccaaatgcattttgaatcagctcttttttcttcgcagccggcaccttcggatggttcaacacatcattaagcgctttttcattttgaaatacttgttttacaacaattagctcttcttctacttgattcagctgagcggactcattggctatatcaaaaagagctgatgcatatcgtttagagacagctgatccactcatcggctttctcctacctctttaagatagtcctggatcaatttctcttgcgcttgttcatccagttctttttcgatcactttcgacgcaatcatgacagaaagagacgctacttgctcacggagagcagaaaccgcctgttccttttccttcacgatttcagttcttgctgcttctttcagacgttcagattctgcacgtgcagcctgaataatctcttctttttgcttctctcccagtttctttgcgttttcgataagagtttgggattcctgtcttgcttcttttaaaagaacgcgctgctcttcaatcagctgctgcgcttctttatttttttcttcagcagacgtaatttctccagcgatgtggtcttcacgctgtttcattatgtttaatagcggccctaaagcgtatttcttcagaagcgctaataagattaacatagctaacagttggaacaggatatctccgccgttaaacgacaatcctagttcaagtggtaattgagacatctactacggcaactcccttctgcaggtttttctttgctgatccagcagccgcacttgtctcttttcagccggcaaggcgggatgcttatcagacataaagcaatggcgaaggttctcttggaatgatcttcgccatttttagttcatataaggcttttatgcttagccaaagaacgctaagaatgcgataacgacagcgataataggaagggcttcaactaatgcgatacccatgaacataagagttctcagttctttacctgcttccggctgacgggcaatcccctctaccgtacgtgaaacaatcaaaccgttaccaatacctgcaccaagtgcgcctaaaccaattgcaatcgcagctgctattaaattcatgaaaaagttcctcctttaaaatgttatccgtttggatataatgttttaatgatcatgactgattttatgagacatgtacaccatcgtcagcattgtaaagataaatgcctggatagcaccaataaataaactgaatgcttgccatgccagcatcggcagaatggcaccgattgtaccgacaagaccgagagccacgctttgcgaataatggcttgttgctaatcccgcaagcaggccgagaagaatctcaccggcgaagatgttaccatacagccgcaaacctagagtcagcgtattcgcaaactcttcgatgattttcatcgggagcatgaatggaacaggtcttaaatagtctttggaatattccttgagccctttcatcttcacaccatagtagtgggttaaagcaacaaccatcacggctagcgttaatgtaatggcaggatcggctgtcggagacttccaccagagctcatgtccgattgtaatagagaacggcagccccagcatattcgacacaaatatgtacatcagcaatgtgacaccaagtgccaagaagttagcccctgtttttaaatccattgtactgccaataatattgcggacgaaatcaacaatccattccataaagttctgggcttttccgggacggatcgaaagcgttcttgtcgtcaatatagcaatcaataaaacaatcacactcgccacagtaatcatcagaatgtttgtcagattaaaagtaagacctagaaattctatagttctgtaaccatgattcaaagggttttcacctctcttccattgatgaacgtttaagctggataaaggaatctatcataatgacagggtatattgtcattaatccaataactgtacttgccatatgaaagtattcgggatttttataggcaacagccacagcaagaatcgcattgcaccaccgcgctgcgctcccgagagatcgtatggactttcctttctcaacagctctgtcaaaagcattcattcttctgacgagcagtaaaaaattaaacaaactgaaaacagttcccagaataaggcctaaaaaaacggttttatacgctgttaaaccataacccagtacatacactgccaaaatgaacaataaatatttgcgttgtctgctaaatgtaagcttgggatcgtccatcaattatctgtctcctgatgaaaaaataatgtatagcttggatacggcaaaaatcagcggttaacccttagtagaagaccttttttgaccggcaaaacgggcctgttcgaaaaaatcattcatccgcaagccttgcagggatgctgtttcattcgcttaaataaatcctcataatacgggtttgctgagaggatttacattgaggatgaggactataatgaaagctatgaaaaccttctcataataccctcgtttagcatacaatagcccctaacatgtgtcaatctgtttaaagttaaaaaactttttatactttacgtctccacagaatgttcacattttcacctataattgtatacagattcaccgaatagcaaaaaactggataaaaaaatgaaacccccttttggggatttcattttttattttgttccaaacatgcgatcacccgcatctccgagacctggaacaatatatcctttttcatttaatttttcatctagcgccgcaatgtaaatatcaacgtccgaatgatgcttctgcaattcttccacaccctccggcgctgctacaagacacatgaaacggatatttttcgcaccgcgttttttaaggctgtgaatggcttcaactgcggaaccgcctgtagcgagcatcgggtcaaccacgatgaattcacgctcttccacatcagaaggaagcttgacatagtattccacgggttttaaggtttctggatcacggtaaaggccgacatgtcccacttttgccgcaggaatcagctttaaaatgccgtcaaccattcccaatcctgctctgaggataggaaccactccgagttttttccctgagatgactttcgatttcgcagcctgaaccggtgtattgatatccacttcttccagaggaagatcgcgggtaatttcaaatgccatgagtgtagccacttcatctactaactctctaaaatccttcgtacctgtattttcattccgtatatatgtcagcttgtgctgaattaaaggatgatcaaatacataaacctttcccatactgtgtttcagctccttttttattgtcccatcaacaattacacacttctattgattctacaaaaaaagacattgagtttcaagaacatcgtcaaaaaacccgccgggcataagccccagcgggttttaggatcttaataatctaattctttatataaaggaaatttatcagtcagagcagctacacgctgtcttgcttcttcaagttttccttcgtcttcgtggtttttcaatgcaagcgcaatgatagcaccgacttcttctaatgcgtctccgtcaaaaccacggctggttacagcagctgtcccaagacggatgccgcttgttacgaaaggtttttcaggatcatatggaatcgcgtttttgttagacgtaataccgatttcatcaagtacatgctccgcaaccttaccagtcagtccgagcgaacgaagatcaacaaggataaggtggttgtctgttccgcctgaaacgagctggatgccctctttcgttaaggcttcagccagacgtttcgcgtttgaaatgacgttttgtgcatatgttttgaaatcgtcctgcaatacttcaccgaatgaaacagcttttgcggcaataacgtgcatcagagggccgccttgaattccagggaagatcgatttatcaattttcttgccaaactcttcacggcaaaggatcataccgcctcgaggaccgcgaagtgttttatgtgttgttgttgtaacgaaatcagcgtaaggaaccgggtttggatgaaggcctgccgcaacaagtcctgcgatatgtgccatatccaccatgaagtaagcgccgacttcatcagcaatttcacggaatttcttaaagtcgattgtacgaggatacgcacttgctcctgctacgataagcttcggtttatgagcgagggctttttcacgcacgtcatcgtaatcaatatattgagtttctttatctacgccgtactcaacaaagttatattgaacaccgctgaagttgactgggcttccgtgtgttaaatggccgccgtgggagaggttcatcccaagtacagtatcgccttgctccaaaatcgtgaagtacactgccatgtttgcttgtgcgcctgaatgaggctgaacgtttacatgctccgctccaaagatttccttcgcgcggtcacgggcgatatcttcaacgacatcgacgtgctcgcatccgccgtagtagcgtttgcccggatatccttctgcgtacttatttgtcaaaacagatccttgtgcttccataactgcttcacttacaaagttctcagaagcaatcaattcgatcttagtctgttggcgttcacgctcatttttaatggcgttaaacacttgttcgtcttgcgcaggtaaatgtttcatcagcgagatcctctcctatccgtatcctgttctttgtttttaccatcactattgtacatggtttttaaggccgatgtaaaagattatttttaaaaaatctaaatttttattggtaaaaacgaatattaataacttaaatttaatttaaagttcggaatttatttcactgtcttaaaataaaagaaaagactggctatgcagtcctttcattcacactcataaaccgcccgcactccgccgattagtttcggccgtgtacgcgccaatgtcacatgagctgaaccgaggctgttttgagagacacgcatagggacagccaccggcttcagatgcatgccgataaacgtatcgcctatatcaattccggcgtcagcctgaatggtttcaacaagaacaggagacttcatctgcttaaacgcataagacgccatcgctccgcccgcttttggaacgggcacggcagaaacggttggaagcctgaacagcttggctgtttctgcttcgacgacaagcgctctgtttaaatgctcgcagcattgaaacgccagatggattcccgttttttcccggagctcagcaagtccgctgtagatgctttcagcgatatctacactgcccgatgtgccgatccggctgccggccacttcgctcgtgctgcatccaaggacgaagagctgatcttgtttcaattccgcttggtcctgaaactcagacagcatcgtcttccacgtttgtttcaactcattcattaaacagcacccctacaggtttttctcttcataatcggagatttttccaatacgcgtttggtgtcttcccccggtaaactcagtagtcagccagatttttgcgatttcccgagccaaaccaggtccgatcacccgttcacccatcgcaaggatgtttgtgtcattatgctccctcgtcgccttcgcgctgaaggtatcgtgcgccagcgcgcagcgaatcccttttactttattagcggaaatgctcatgccgatgcctgtcccgcaaattaaaatgcctctgtcaacttcgccgctaaccactttttcggccaccggaaaagcataatccggataatcgacagagccgctgccgcagtcacagcccatatcaatatattcaatttgcaattcgtccattaactctttgatttcatttcgaatgtgaacgccgccatgatccgatgcaatggctactttcatctgcttttcctcccagcgtgtgtgatgcggcccgcccgctttattgaccgcgcagcctgtccgctctttgattcacaccatatgatgtgcttttcactatattctactccttcacgcaggatttgcaaatgacctgtttgcagattttctgacaacttatctacggtcttttttcagctgttttgccagctgccgaagaagctcttcaagctcatctcgcgtttgtttatagatgtcaattgagccgccgaacggatcgaggacatcaccatggctgcctgtgacatattcttttaacgtaaacactttatcacgataacgtccaaattggctggcaatgatctgtttgtgctgatgggtcatagccagaaccaaatcagccgattccataagttcttcagttaatggagaagacacatgattaagggcaatgtgtttttcaaacaacgcttcgactgcatgaggcgtcgctttcccattaggtgaagcaaacacacctgccgagcggacattgacattcagcccttccatttctgcaattgatttaaaaagcgcctcagccattgggctgcggcacgtatttccagtacagacaaaaataatatccatgtcagtcaccccttatttttctctattatatatgaagaaaaaagaaacggcgacttcgtttcttttattggtatattaaattggcaaaagcagctttaatccaaacacgattaatatgatgcccccgagcgcttcgctgtatgtgccaagccatgactgcacttgttttccgaccagcaggcccagccatgtcaacatcatgctgaacagcccgaacagggtaattgtgaggagcggatgcgagccgtatatccccaagctcaagccgacggaaaagctgtcaaggctgacgccgatggcaaacagcaataagcccggccctgccggtgacatgaatcgttcttctgactgtttaaaagaggccataagcatttgaaccccaagaacaaaaagcagcgccccaccgatataaaccgctaacacgccgaggagccctgacagcatgttaccggccgccatccctgcgagaggcatgatgacgtgaaagaggccgatgatgaaaccaatatagaatatctgcttctttctaagtttgaccatgcccattccaaggccgacagaaaaagcatccatccctaaagcaaacgccatgatgcttaatgtaatcagttcgcctataaacaaatccgacatacataaataacccccttggacacgccccgcttttttagcctatgcgtgtccaaaaagggttagaacatctgactgctttcagcgaatcactcttcctccggcggctttcatcagcctgttcataatagcaagaccgacacctgtatccggaaaggattccgctataatgaaatccaccttattctcatcaaagctgcgcaaagcatcatacagccctgccgcaacagtctcaagctgagcccgtcttccgcagctcttcacataatcagcggaataaacgcccgcgttttcttctgtcgtcaggacaccgacccgtcttccgccctgttgatattcttgaatgaggtgctgaatgcgctctgggctgccttcgcaaatggcaagaggcgctgtcggcgcataatgtgtatatttcatccctggagaaatcggcttctcgttttgatcgctgagccctttatccacatggatcggcccgatcacggcctcaatttgttccttcgtaatgccgcccggacgcaggagaacagggatgtcgtccgcacatgaaagcacagttgattcgaccccgattccggtagggcctccatccataataccggctatgcggccatccaagtcgtgagccacatgctccgcttttgtgggacttggcttgcctgatagattggcgctcggtgctgcaatcggcagtcccgattcgcgaatcaatgcaagggcaagcggatgatccggcattctaatggcaaccgtttcaagacctgccgttacacgaggtgaaagcgcatcaggtttgcaaggcagaatgagcgtaagtgctcccggccaaaaccgtttcatcaatgttttcgccttttccggcgccgggcccgttaaatcctcaagctggctgatatccgcaatgtggacaatcaggggattatcgctcggccgccctttcgcctcatatatttttttgacagcatccgtattttttgcgtttgcgcctaggccatatactgtttctgtcggaaaggcaacgacctcattttctcggagcaaagcggctgcttgtgcaatttgtggatcatttgtggataactcgtcagttacatccacaaaccatcttttcgttttcatttctgaccaaactccttattcacaacaataaaacgattgttttacgcgtgtaatccttttgaaagtataaaagatgtcctgtaataaaacaagcgttatccacaaattgtggacaacgctaataaagaagtggataagtatgtgtataaactgcacttatccagacgcttttttcatcaaaacggccccttctgtttgccgcgattcacagaagtgatcagaagaaaacagctcctccggtacactttcagctctttcaaaacccatggccgtcagaaagtccgcagaggaatgctgattcgctactaggtacacggttttgatctgatgcttttcgcacagcacctccatgctttgaaaaagcgtgacgatgtggccttggtgaagcttgtccgatatgacaagtgatcgcagcagcccctggtcacagctgattttttcaataccgaggcatccggcaatgtttttctcactgtcctccagcataagaaattgagtgaagccttctttcacgccttcatagctggttttcgcctgttttaaaaattcctcgagcacatctccgtctttttcccttgccacccgcagttgataaaacatccgttcaccccgtttttgcgttctttcttccaatctatgaggcaaatctatttttagaccagatgattaggaaaaaaggtcggaaatccattcgactaaaaagaatttcacttctgtgccgtcttctttttcttcattctcttcttttttggctttttccgctttagcggttacgtcctcaagcactttttcagtctgcttttttgaggcttctttatcttcttgttctttgacggcttccccgttagaaaaatcgagaaagcagaggggcgggaacagcacacaccaccagttggcgccgtctccgtttccaagcgtaatcaaaatcgcttcatactcaccggcaggatataccatgttgccgtaaagctttgtcggaaacgagattttgtcaaaatcaacggatatcgactgattcgctccttctttctccattgtttcctttgcaattgctttgatttcaggcagctttgaacgaatcacgcgacgcgcttcttcaatagaagtaatatcctttacccaagttgtgatttctttattcaccgcgtctcttatatgacgttttaattgctggtcttgatcactatcgctgtttgccaatattctcaaacgaatcgcctgatccggtatgaccaccggctgattttccgatttctgtgccgtctcttcttttgccagccctacgagcgctccagataataaaagaaagatatatatacaaatgattactgtttttttcatcggtccccaccgttcctctccgtgctttgtttctagccctattatggacaaggagagccgggggtaaacgtgcagggtgaaaaaaatctagcaagctgttaatcttatttatggtacgatagtgttttaggaggtttaagatgaaatacaattatacagtgctgttatcagcattcacgatgtccgttctttattcagtaatttatattcattcatttatcattgccgctctcatcacaatggcattttattttctgtttccttatttgatcttcgcactgccgcttcaaatcatgatgaataaaaagccgaaacggttcagccctttgtatctgctgtattaccttatcgctgcttttattgccaacgcgatcattttcggcgtgcttcagccttcgggacaatctttgtttcaaaatacagccttttatcttttcgctgtattaacagctcttatctattggatatgggattctgttttactgcaaaaaaaggaagcctaagaggcttccttttttattaaaacaaaatcgtcagcaaataacatagaatggaaggtatcgccgcaacaaagaaagcggccgccattttcatgcgagatgtacggccttctttggtttcagaatggtagtttgcccgctgatcgcttccgcttacagccaaacccgatgtaatgatcgcgagccccactaaaacgagagacgcaacgccaaaaatcgcttcatatgaaagagcctgcggaaaaatggtgccaatcatgctctcaatcgcaatgagcaggattcctgctgtcagggcctttttcatgtttacatcccctttgctggtgttaaacagcttgatccattcactcgccagcaagctgcttatttatttttatgaatcagagcgcatatggttctgtcttttccattaatatctttcagcacttccacttccgcccccttaaacgccttgaggatcaggtctttgaccgccgctccctgtttccagccgatttcaaaaacgacaaatactttatccttcataacaagcggaatgtcttccataaaccgcttataaaatttcagcccgtctccgccatcggtgagtgcgtgcagcggctcatgaaaacggacaatttccgataaatcagccatttcttcctctgaaatatatggcgggtttgagacaatgatatccgctttttttcccgccttaataaaaggctcaagcagatcgccctgataaaagcgcacattcgctccgagtttttctgcattggcagaggcgacttgcagcgcctctttcgaaatatcgaccgccgacacagaaaagctttggttttcaagcgcaagcgtgacggctattgcgccgctccctgtaccaacgtcaacaacttcaagcttgccgtcttcagaaaagacactccgatatttttcaagcaaatgaaagacaacttcttcagtttccggccgcgggatcagcacatcatcattcaccataaattcccgtccataaaaaaactcttttcctataatgtattgaaccggcacgccctctttatgcatctcaacgtgacgcttaaagcgatacagttcgtcttcaccaatcggttcctgtaagcttgcgagcagtttgcttctctccattccggtatcataaagcaataggagctcggcagcattttcttctcttcccgcttcggttaaataagaagaagcccatttcagggcttcgaatatcgtcttcatcttaaccttccgactgctgaagcttgcttgcctgatcttcaacaatcagcgcttcaaccacttcgtcaagttttccttcaagaatctgatcaagcttttgaatcgtcaaaccgattctgtgatccgtcacacggttttgcgggaagttgtatgtgcggatacgttcagagcggtcaccagatccgactgctgatttccgtgtttgatcatattcagcctgggcttcctgctgaaatttatcatagattctggcacggagaaccttcattgctttttctttgttcttaatttgagatttttcatcctggcatgatacaactacacctgtcggcaagtgagtcagacgaaccgcagacattgttgtgttaacgctttgtccgcccggtccgcttgaagcaaacgtatcgacacggatatccttctcatggatgtcaacctctacctcttctgcctcaggaagacatgctactgttgcagtggatgtatggatgcgtccgcctgattctgtttccggaacacgctgtacgcggtgggcgccgttttcatatttgagtttagaatacgcgccgcttcccgtaatcataaagatgatctctttgtagccgcccgttccggttacattcgcttccatgacctctgttttccagccctgaagctcagcataacgggaatacattctgtacaggttgcccgcgaataaagcggcttcctcgcctcccgcagccccgcggatctccataataacgtttttgtcgtcattaggatctttcgggatcaggagcaccttcaggcgttctgacagtgtttccgtttccttctgaagttcagaaatctcttccttcaccatgtcgcgcatctcagcatccagcttctcttcaagcatcgcttttgcatcagccagctgttctgacgcatctctgtattgtctatatacgtcaactgtttcttgtatatcagattgctcttttgaatattctcttagctttttcggatcgttgactacttctggatcgctcaaaagctcatttaatttctcgtatcgttcttcaattgattttaaacggtctaacacggtcttcacctctgttttcctgtgcgtaacattctcattatagtatagtgattaaccccagtcaaaagcatttcaatcccagctttaaaagcctcctctgctatactgggaatcgaggagggatattgttgctgaaatccatacatcatattgcaatcatatgttcagattacgaaaagtcgaaagctttctacgtacataagcttggttttcaggtgattcaagaaacgtaccgcgaagagcgcagctcctataagcttgatttgtcgcttaacggctcgtatgtcattgagctgttctcgtttcccgatccgcccgaacgacaaacccggcctgaagccgcaggcctgcgccacctcgcctttacagtcggtagcttggataaagcggttcaggagcttcatgaaaaaggaatcgaaacagagccaatcagaacagacccgctgaccggcaaacgtttcaccttcttttttgatcctgaccagcttccattagaactgtatgaacaataacagtttttgaagaaaaaaaggagatacccactttctttgccgaatcttttcttgttttgtctaacgggaagggaacctcattctatggtcgaatacctagcttaaaaggaggtatgggatcatgaatacaaatatggtagcaagtgaactcggcgtctccgcaaaaacggtgcagcggtgggtgaagcagctgaatctaccggccgaacgcaatgagctcggacactattcgttcacggcagaagacgtgaaggttctaaaatccgttcaaaaacaaatctctgaaggcacggcgattcaggatattcatctgccgaaaagcgctaaaaagcgcacaggcttccttgtccaaaaaacaaatagcgacacagaacgaagaatcgagcagcttgaacaaaagctggacacccttttacagcaaaggcaggacgaaagtgaattgatggcaagaatgtcggaactggaacgccagctgaaacaaaaagccgatgaaggtgtatcttaccagctgcttcagcaccgcagagaaatcgatgatattcttgcagatctgcaatcactgacctcacaaatgaaagaattcaccgctcagccgatccccgagactgctgctgcttctgaaaaaaccaaaacaagaaaaaaaccgctgctgtcactgttcaaatttcaaacctaaagcaaaaagctccccgtaaagggagctttttttgttacgcagtaagcgcgataatgattggaagtgaaatcaatgacagaatcgcactgaccacaaacgcagttgcagtttcttcttcttgtttctcgaaacgagtcgcaatcatggctgcaacggcagaaccagggaatgcaacaagaaggattgcttttgttgtttggtcagccggaagtccgatagcaagagcaatcaggaacattaatgcaggctgaaccgcaacttttagtaacgcaataccgatagccggcatactgagtttaattttacgaataccaacggtaacaccgacagcaaagagagcaacaccagatgttgtgcttccaagctgatcaagcattttaacacccagctcaggaagagtgaaattgaaaaccagcaccaagatcatactgattaacggagcagctgcaagcggctcacaaagaccatgcaggattgattttcctgtcatcttccagaagctgtcgccactctcttcgtttttcttagaagactcaccaacagtagcgataatgatcgcgagcggatcaagaatcgcgttaaccacgatacctgtgaccgcgatcggaatcgcaacttcattcgctccgaataagcttcccaataccgggatacccataaatgcgaatgtcggctgtgcagagttcaaagaaaatacagatgagttcgttaaatcatacttgaaaataaatctgcaaaccaaaagaatgatgatatagaaaccaacaatcccaataattaaagaaatcattaaaggtacttgtgataaaaattcacttctggaagttgtcaaaataccagcgataaagtgagctggaagtgcgtatttcgttactaacgtacttaccccttttgccgacttggcatcataacttccaaaatgtcctgcaaaccaccccagcacgataacaaagaagatcggcgccaggaggattaagatatctaagatgctcaaaatattctcctccaaatcctatgtccgtatactttagctttacaaaaagctttccctcggacagaaaaatttactcgctaattatttcgcgatgacttttttgtattcaggtgtccacattgcttcaagtaccgcttgtttcacatcttcaggctgacgatttgccacgccgtctttaattgctgcttcagcaacggcaatcgcaacttggatagaaacctcttgaagcttatcaatgcttggaagcaatcctgctccaggtgtttcaagatcaaccatttcagcaatcgcatcagcagttgctgcaaacatagcaggtgtaatgatacgcgcttcagctacaattgaaccaagtccaagaccagggaacgcgaatgcgttgttagattgtccgatttcataagaaacaccgttgtattctacattgtcaaatgggcttcctgttgcaataagcacttttccgtcagtccatttgaacagatcttcaggaacagcttcagcaaggtgagtcgggttagacatcggcatgataaccggacggtctacgtgagatgccatttcttttacaatttcctctgtgaatgcacctgaaacccctgaagtaccaatcaagattgttggtttcgcttgacgaacgacttcatcgaatggaatttgacctttttcatcgcgcttccagtctttcacttcatccgcattgcgaaggtaaggtttttggaaatcaaggatgccttcgatgtcttcagtcagcaagcctctgtaatcaagtgtgtagaaacgtttgttagcttcttcttcagataatccggctagcaccattgtgtcacggatttggtcagcaataccgataccagcagaaccagcaccgaagataacaacacgctgatctttaatagaagcgccggttttcttcatagcggcaagcacacctgcaagtgtaatcgcgccagtaccttgaatatcatcattaaatgtcaggatttcatgattgtattttttcatgatgttgcgtgcatttttgttgccaaggtcttcccagtgaagaagcgctttagggaagaatttcaatgcagcttttacataagcgtcaatgaaagcttcgtagcgttcaccttgaacacgttcatgcttgttaccaatatataaaggatcgtttagaagtttttcgttgttcgtaccgacatcaagcacaaccgggataacacggctagggtcaataccagctgcagcagtgtaaacagctaatttaccgattgcgatattaataccgcctacaccccagtcaccgataccgagaatgctttcagagtcagtagcaacgataagatcaatatcgcctgctgtcgcgtgaaggttttcaaacgctttttcaataccgtcaatgttgtcgattgacaagtagattccttgaggtcttctatattcatggctgtactcctgaatcgcttcaccaactgttggtgtgtacacaacaggaagcatttcgcgaagatggtttttcagcaatttatagaaaagaacttcgttacggtttgcaagatcacttaagtaaacattttgacgaaggcggtcaggctgcgcttggaattgctcgtacgcgcgttgtgcttgttgatcaagagaaagtacagttggcggcagaagcccttctaagccgagttcttgtctttcttctagtgaaaaagcaacgcctttatttaaagtaggaatagataaaacttcttttcctctaagagttgtttctaagtggccttctttcgttttttttatgttattcaagcaaatctccttctttcttgaaatagttaaccaagttaagtaataacccatctaaaatatgaccgatcatgatctttatgcgactttgtgacaattattcgaacaatgtctcaaaactatttacattacgtaagctattgtatgcctgtcaaaatcaaaattcaagggaagaaaattacttaattttttaatatacttatttaaattttttaattgcatattatcagaatataaaaaaaacaccggtgtttttagccggtgcattctatctttatacccatgttttggactattttttagatttacctgggacttcgtgatgatgtctgcatcttgcttcatatgattcagatgcaccaaccaaaatgaccggatcatcgtaagaagcaggtttgccgtcaatgaggcgctgtgttctgctcgccggtgatccgcaaacagaacagacggcttgcagctttgtcacactttccgcaatcgccatgatattcgggacgacaccgaacggctctcccctaaaatccatatcaaggcctgctgctatcacacggtagcctttatcggcaagagatgataaaacctcaacaatttcctgatcaaaaaactgcacttcatcaaccgcaatcacatctgtactttcactgatgtgatcccaaatgtccgcagcagacgaaatggcatagctcgtcatcgatgttccattatgggagacaacagcagcttcgctgtatcggttatcaattacaggcttaaataccctgacttcctgcttggcataagttgctctcttcactcttctgatcagctcttcagatttccccgagaacatgctgccgcaaatcagctcaagccacccgctttgtttcattatgtacataggcttcgctcccctctctctgccagctgtgttttagacaatataaaaaacaggcaagactgctgcttgcctgttgagaaatctattattacttaagaccgtattttttgttaaagcgatcaacacgaccatcagcagaagcgaatttttgacggccagtgtagaatgggtggcattcagagcaaatctcaacgcgtacctcttcttttactgagcctgtttcaaattcatttccgcaagcgcatttaactgttgcttttttgaaattaggatgaattcctgctttcattgtatccatctccttccgccctgaatcccgtgtggaaacagagttattatttcggagcattgtccgaaacgcatatgagaaaattatatcagtgatttacttcttttgcaaatacaatttaccttcttgcagatgatagatttgcctgtttccattcttgattgagaatatcgaaaaattcctggtttgttttggtttttttcatttttctcatgaacttttctgcgaaatcaggtgaatcagacatcgttttgcggatagaccataaacgatcaagatgctctttaggcacaagcagctcttctttgcgcgttcctgaacggcggatatcgatagcagggaagatgcggcgctcggcaagagagcggtcaaggtgaagctccatgttgcctgttcccttgaattcttcataaatgacatcatccatacgtgaacctgtatcgaccagagccgtagcaaggatggttaagctgccgccctcttcgatatttctcgcagccccaaagaagcgtttcggacggtggaacgccgctgggtcaatccccccggaaagcgttcttccacttggcggaatcactaagttgtaggcgcgggcaagacgtgtgatgctgtccatcaggataatgacgtcttttttgtgttccacgagacgcatcgcacgttcaagcacaagctcggccactttgatatggttttccggcacttcatcaaacgttgagctgacgacatccccagctacagagcgctcgatatcggttacttcctcaggtctttcgtcaattaaaagcacgatcagctctgcttcaggctggttcgctgtaatgctgttggcaatttccttcagcaacatcgtttttccggctttcggcggcgcaacaatcaatccgcgctgcccaaatccaaccggcgccatcatgtccataattcttgtagacaagaagttcggctttgtttcaagcaccatttgacgatccggataaagtggcgtaagagccgggaaatgcacacgctcttttgcagattcgggatcatccccatttactgcttcaacgtgcaaaagtccatagtaacgctcattttcttttggcgggcgaaccttgccagatactttgtctccgttccgcaaatcgaaacggcggatttgtgaagctgagatgtaaatgtcttctgagcttggagagtagttgatcggtctcaggaatccgaaaccttcagactggatgatctcgagaacgccttccataaacagcagatcttcctgttctgcattcgctttcagaatggcgaaaatgagttctttttttgtcagtttgctgtaataggagattttataatgtcttgcaagttcataaagctctttcaatttcatattttccaaagaggaaatagatacgtctttcataaaaacaccacgcttttcatagtcaatatcttactctgaacatgtcatctgctgcttttgcacaacatccgccaaagcacattctttttttaacataaaggaacttctatcggtaacacttccacccatgatcggcgcttttgttaaaaggattgtcttaatgagttttgaaggaagcgaggacaaaaacatgagaagatcaatacttatatcgtctgtatgcggtagaaattgaaactttcctagtgcttaaaagaaggtattacgcagtaaaattcgcagcactctttatttttaccttatttcaaaaaattattcaactgaaataaggttttgacacggaattgatagagttgacgcttttctgcaaaagttaaagcgggctcacacccgctttttctgtttgttatggacggattacaagatttggtttctttttcaagctgtgtctgccgtcaacgaaacgaacagtgcccgattttgcacggataactaagctttcagttgtaccgacagagcctttgaattgaactccttttaacagctcgccgtcagtaacccctgtagctgcaaaaatcgcgtcatcacccttcacaaggtcttccatgcgaaggactttgcttaaatcaaggcccattttgtgacagcgagtgatttcttcttcgctttgcggaagaagtttaccaatgatttctccgccgagtgctttcagcgcaacagctgaaagcacaccctcaggagcgccgcctgatccgaacaggatatcaacgcccgtgtggtcgaaagccgtgttgatggcgcctgcgacatcgccgtcattgatcaatttgattctggcgccggcctcacgaagctcggaaatgattttttcgtgtctttcacggtttaaaattgtggcaacgacgtcctcaacgtccttgtttttcgcttttgccaccgctttaaggttgtcaatgacaggtgcttcgatgtcaatgcagcccaccgcttccggaccgactgcgattttttgcatatacatgtcaggagcattcagcagagtgccgtggtctgcgaccgcgatcaccgtcagcgcgttccagccgccgcttgctaagatgtttgtgccttcaagagggtcaactgcgacatccacgcgagggccgtacccgtttccgagtttttccccgatatacagcatcggcgcttcgtccatttccccttcaccgattacaacggtccctttcatcggcactgtatcaaaaacgtctctcattgcacttgttgccgcttcatcagcctcatcttttttcccccggcccatccatcttgctgatgccaatgccgcagcttcggtcacacgtaccaattccattgataaacttctttccatttcaacacgatctcctctcacaagaaaccattatgaattttgaagctgttctatttcttcgtcagtcattctttcccgccaaattgtcgctccaagcccctcaagcttcttctcaaggctgctgtatccgcggtcaatatgctccagtcccgtaatttccgtgacgccatcagccatcagtccggctaccaccaagcaggctccggcacgcagatcactcgccttcacttttgcgccttgaagctcaacaggacctgtgatgatggcagatctgccttctactttcatattggcacccattcgtctcagctcatcaatgtgcttgaatcttgccgagtagatggtgtctgtgacgacactcgtccctttcgcccttgtcaggagcgccgtcatcggctgctgtaaatcagtcggaaaccccgggtatacgagggttttgacgtcaaccggctttaagttcttctgcccgccgacaatgaggagctggtcgtcgcttgtttcgatatgatagcccatttctctcaactttgccgttaacgactctagatgagtgggaatgacgttatcgataatgacttccttgcccattgcagcccctgcaatcataaatgtcccggcttcaattctgtccggaatgatcgtatgcttgcagccgtgcagttccttcacgccgtcgattcgaatcacattggtgcccgcacctttgattttggcgcccatgctggtaagcaatgtcgcgacgtcaatgatctcaggctccttggcagcgttttcgatgatcgttttcccttctgccaaaacagcggcgagcataatgttaatcgttgccccaacgcttacgacatctaaataaatccgtgcgcctctcagcctttcagctcgcaaataaatggcgccttgttcattggttacttcagctccgagtgcttcaaagcctttgatatgctgatcaatcggacggggccctaagtgacagccgccaggcaatccaatgaccgcctgcttgaagcggccgagcatcgcccccattaaataatatgacgcgcgaagcttttttactttcccgttaggaagcggcatgctgatcatcgacgtagggtcaacaaccatttccccattctcaaaatgcacgtggccgccgatttcctttaacaggtcacgcagcgtttcaatatctgaaatctctggaagcccttcaattgtcacctcggaatttgccaaaatggttgcaggtattaacgcaacagcgctgtttttagcgccgctgatatgtactgtaccgtttaacgagtcaccgccggcaatattcaacttttccatgatagtctccttccataagaagatagctgcggagctaaataaaatgtcattttattctgtctctgcaaataaagctcatgtccaaaatctagccaattcgaagagaaagaatacaacacattgtaaaatatcaggaagaaaatagcgaagctttggggggtacaggtttcaaaagatgcacagagacccgccggctcgagagacatcgtcgtcatccggcaaaagcagtacgcatacccttcattccgatatcagcttctgcagcccaatgattccttctctgtaaagcggcgtcagcatctgaagatccgctgtatcaggtcggtgaaatacaaaggccgcggcaaacaggcataaagctgtttgccgcccctttcattatttgttccagtctgccaggaattgttcgattcctttgtctgttaacgggtgtttagtgagcgcatgaatgactttcagcggcattgtgccgatatgagcccctctaagagcagcttctgtcacgtgctgcggatggcggattgacgctgcaatgatttgcgtgtcaaggccgtgaatgtcaaaaatctgtttaacttctgaaatcaggtcaagcccgttgtggccgatgtcatctaaacgtcccaggaatggagatacatatgttgcccccgctctggcagcaagaagcgcctggttggcattgaagatcaatgtaacgtttgttttgatgcctaagtcagtaagtgctcttaccgcttttaaaccgtcagacgtcatcgggattttcaccgtaatgttcggagcgatcttcgccagttcttttccttcctcgatcatttcctcagctttcaaagaaataacctctgcgcttacagaccctttcacgacgtctgtgatctcgcgaagacggtcgtggaatgatacgttagcttcctttgctactaaactaggattcgtcgttacaccggcgagaattcctaattcattcgcttctctaatttcatcgatattggctgtatcaacaaagaataacattttcaaaaagcctccctgattaagaaattttctgaactgtgaatatgattgcgctttctaaagatagacggaaaaccgcctgtcaagctgtcaggcggctataaaaagttccaattgaattaagcttggtttgaagaaccaaattcacgcattttaccgataactgtttctttgatcgcttcacgagctggtccaaggtatttacgtggatcgtactcgtcaggcttagctgccaatgtttcgcgaacagcttttgcagaagaaatttggttttcagtattcacgttgattttagctgtaccaagtgaaattgattttttgatgtcagcagtcggaattccagtaccgccgtgaagaactagcggaagaccagttgattttccgatctcttccatttctttgaagccaaggtttggctcacctttgtaagggccgtgaacagaacctaatgcaggtgcaaggcagtcgatgccagtgcgctcaacaagctcttggcactctttaggatcagcgtagattacgccttcagcgataacgtcatcttcttgtccgcctactgttccaagctcagcttctacagatactccgtggaaatgagcaagctcaacaactttagcagttgttgctacgttttcttcaaatggatggtgagaagcgtcgatcattacagatgtgaaacctgcatgaatcgctttcgcacaagattcaaagcttgaaccatggtctaagtgaatcgcaacaggaactgtcactttgtactcttccataagtgcttttaccatagcaacgactgttttgaagccgcccatgtagcgtcccgcaccttcggaaacaccaaggatcactggagatttttcttcttcagctgcttgtaaaatcgcttgagtaaactcaaggttgtttaagttaaattgtcctacagcgtaccctttttctttagctgtattcaacatttccgtcatagaaactaaaggcatgtcgaatgtcctccttatgtagcctgattgtcttctagcgaaaaaagctttccaccctagcatgacccatatattgctgtcatatgtaaatactcagatcgctttttctccataactaggataccaacttttcgacaaatcggcaacataatgacatgattcatttgtttcttctttttgtcagttagacttcaggggcagatattttttgacggcgtctctgatttcgtcgatgtcaaacggcttggcgaagtgcgtcagagcgcccaattccttcgattcctggatcatgtcgagctctccgtatgccgtcatgataatgacccggatgttttcgtcaatgaccttcatccgttttaagatttcgattccgtccatgccgggaattttcatgtccaaaagcacaaggtcgggccgttcttttgtcacaatgtcaagcgcctgcaggccgttcgcagcctgaaacgtctggtagccttctttattgaacacttcatttagcaaaatacgaatgccgtattgatcatcaacgattaaaattttttcattcatcattttacaccccaatattatgattttcgtcaaaagtaagcagtattgtatgtattctgtttgattttcctatttcctttaattataatagtctactttacgacattttctgagcattttctcttttgttgtatactgatattgtacgttataaaggaggattcacttatgttgaaaatattcacgacgcagttaacaggtattttttcccgcattcaggataaggaatctgacgcgattgaagatggggcgcggctgcttgctcaagcggtgatcagcgggcattccatttatttatacggagcaaatgagctgcagggcgtcttttttgaggccactgaaagcaaagaacccttcccatctgtcaaagcctttccagaaagcgctgaggaagtgacagaaagcgacagggtgctgatgttttgctcagggacgggcacagccgaagaacaggcgctctcaaaagagctttatgaaaaaggtgcgggagtcgtatgcgtatcgcccgcagccaaagacagtgcgggaatagaacagtattgtgatgtgcatattgattctaaactaaaaatgccgcttgttccggatgaagacggcacccgttacgggtttccctctttaatgacagcactgtatgtctatcacgctttatcgtttacactaaaagaaattctgcaagagtatgcataatatcttattgtacatgctggaacttgccggaaacaaataaaaaagacttgcccgcttttgacaaacggcaagtcttttttattacttctgatttgcagcttcgacagacgctccgataaagcctttgaatagaggctgaggtcttgtcggtcttgacttgaactctgggtggaactgagaagccacgaaccaagggtggtctttcagctcgatgatttcaacaaggcgtccatcagggcttgtgcctgagaatacaaagccttgctcttccatttgctgtctgaattcattgttaaactcatagcggtggcggtggcgctcgtacaccacttcatcctgatacacttcaaaggctttcgtgccttcttcaagcttacaagggtaaaggccgagacgaagcgttcccccgagatcctccacatccttttgttcaggaagaagatcaatgatcgggtattgagttgacggatcaatttccgctgagtgggcgccttttaagcccaatacgtttcgtgcgtattcaatagacgccacctgcatgcccaagcaaatgcccaagaacggaatgttgttttcgcgcgcgtattttgtcgcgacgattttaccttcaacaccgcggtctccgaatccgcccggcacaatgatgccgtctgttccgcttgtgagttctgcgatattgttttctgtcacttcttccgcgttgatccatttcacttttacatctgcgtcaaacgcatagcccgcatggcggagagactcgacaacagaaatgtatgcgtcaggaagctcaacgtatttgccgacaaggccgattgtaatcgtttgagacaggttgctgactttgttaacaagctctttccattcggacatttccgcttctttgcatgccaatttcatgtgctcgcaaacaagcttatcaagcccttgtttttgaagctccagcggaatggagtaaaggttgtccgcatcttcacattcaataaccgcttttgtatcgatgtcgcagaatagcgcgattttatctttcatatcttgagaaatcggcatttctgtacgaacgacgatgatgtttggctgaatgcccaagctgcgcaattcttttacgctgtgctgtgtcggttttgtttttaattcgccagcagctttaatgtaaggtacgagcgtacagtggatgtacattacgttttcacggccgatgtcgctcttcatttggcggatcgcttcaaggaatggcagtgattcgatgtctccgacagtaccgccgatttctgtaatgacaacatctgcgtttgtctctttccctgcgcggtaaacacggtctttcaattcgtttgtgatgtgcggaatgacctgtacggttccgccaaggtaatctccgcggcgttcttttttaagaactgttgaatagattttacctgttgtcacgttgctgaatttattcaggttaatgtcgataaaacgctcatagtgaccaaggtccaagtctgtttcagcgccgtcatccgttacgaatacttcaccgtgctggtacgggctcattgttcccgggtcaacgttgatgtatggatcgaatttttgaatcgtcacgttcagtccgcggtttttcagcaaacgccctaatgaagctgctacaataccctttccaagtgaggatacaactcccccggttacaaaaatatatttcgtcatttcgtttgctcctctcttcgctcttagctacatttttaaaatgtactattttataaaaaatcatttagccttttaaatgatttataagaaaaatgaggggtgaaaataagaaagctccctttcaatttcttgaaagggagcataacgtactatgttctctcttcgtttttgaagagcccaaaatacatactacctagttcgactatgaaagtcaagatcgttttgaagatgaaatctgatactatttaatttcctcttcttcatcatcatagtcttcatcatcttcatcaataatatcttcttcgatctcaagatcatcgtcgtcttcatcaagatcttcttcgtcaaaatcgtcggcttcaagatcgagttcttcctcaacttcatccaaatcaaggtcgtcttcgtcgatctcttcaaactcgtcaagatcaagatcttcttcgactgctttcttcgcttttttctttttcgccttgactgtcggctgagtttcttcatcaagctgatcatacggataccagctgcgaagcccccacgtctggtcagaaagcgccaggaagcggccgtcaatgtttaaatctgtataaaattgagcaatgcggtctccaagctcttcttttttcacgccgagcaaagatgcgatttcatttaaaagctcctgaaaaggaactggttttttatgttcttcaaataattcgtgagcgatttcaactaaagccatttcctttagctcttcctgtgaatattgtttgatacccaaggtcggacactccctttctattacttatatgtatctgttttatcaataatgaaagcgattttgtatcgttcttatacaaaccatacctctcattataaacaaaataaaacagaatatgctacccttaacagcgttaatttaaataattttacaagagtgatccgactgagagatgttttccgttaatccgcgagcattctggagatgaccagtctttgaatttcttgagtgccttcatagatttgcgtgatttttgcatcacgcatatagcgttctaccggataatcttttgtatagccgtagccgccgaaaatctgcactgcttcggtcgttaccttcatcgccgtatctccagccatcagtttggacatggcggaagcttttccatatgggaggcccgatgattctaaccacgcagcctgataggtcaatagccttgaagcttctatcattgtcgccatatccgcgagtttaaaagcgacgccctgctgctcggcgatcgattttccgaattgctttcgctcttttgcatattgaagcgccgcatcaagcgctccttgggcgatgcctacggcttgtgcagctatgccgtttctgcctccgtcaagcgtcttcatcgcgattttgaagccttctccttcttctccgagacgctttgatgcgggcactacacaatcttcgaacatgatttccgttgtcggtgaagaacggatgcccagcttcttttctttcttgcctgtaaaaaatccttcaaaatccttttctactataaaagcggtaatgccttttttctttttctcgggatcggtgacggcaaaaacaatgtaaatatcagcaacgccgccgtttgtgataaacactttggaaccatttaacacatagtcatcgccgattcgttcagcagttgttttcatgctgccggcgtcagagccagaccctgcttcggtcaaagcgaatgcgccgattttctctccgagggccagctgtgttaagtactctgtcttctgttcctctgtcccaaaggcaaacagcggccagctgcaaagagagatatgggcggaaagcgtcacaccggtggaggcgcacacttttgacagctcctccaccgcgataacgtaggccaaatagtcacttccgattccgccgtaatcttcaggccacggaattcccgtcagccccagatttgccatttcccgaaacaactcgcgatcgaagcgttcttgttcgtcccgttctgccgctgtcggggccacctcatgcttcgcaaaatcgcgcaccaattttcgtatcatctggtgttcttctgataatgaaaaattcattgcttctcccccattttcagatcagcgcctaaaacggattgagccagaagctcgacgacatcgtacgttttgacttggtcttcggcttccttcgcctttgtgccgtccccaagcatcgtgagacaatacggacagccagaactgatcaccgatgggttgactgcgagcgcttgctctgtcctggcgacgttaatcctgttgcctgtttcttcctccatccacattaatcccccgccggctccgcagcacatgccggtttcccggtttctctccatttcaacaagctgcacgcccggaatggctttcaaaatctctctcggcggatcatagacttcattgtaccggcccaaatagcacgaatcatggaaggtaatcgtctcatgaagcgggtgctgcggtcttaattttccgtttttcacaagctcggccagcacttctgtatgatgataaacctcgccttcaaatccgaaatccggatattcgtttttaaataaattgtatgcatggggatcgatcgtaacgatttttttgacatcatttttttcaaattcagaaatattcttctcagccagctcttggaacaaaaattcatttccgaggcggcgcggcgtgtctcctgaatttttttctttattgccgaggatcgcgaaggacacgcccgcgtgattgagcagcttggcaaaggaaattgcgattttctggcttctgttgtcgtaagaccccatggagcctacccagaaaaggtactcaaattcttttccttcttttttcatttcttttacagtcggaatctcagcatccggcgcctcgtcacgccaattttcacgttccttgcggttgagtccccacggattcccttgccgctcaatacttgtcattgcgcgctgggcgtcactgtccatttttccttctgtcagtacgaggtagcggcggaggtcgatgattttatccacgtgctcattcatgaccgggcattgatcctcacagtttcggcaagtggtgcatgcccaaatttcttcctctgtgatgacgtcgccgatcaagcttggattgtaatcaagcgccgctgcggcttcctgcgatccgctgcccgctgacgaagcagccagctgattgcctctcgtatgccgaaacgctgctgcgggcacccatggggagcgcgaggtgacggcagcgcctttttccgtgagatggtctctgagacgcaaaatcaagtccatcggagaaagcatttttccggtgcctgttgcaggacacatatttgtacagcggccgcactcgacacacgcgtacagatcaagcagctgagaccgtctgaaatcctcaatttttcccgctccgtagctttctttcgtttcgtcggtaaaatcaattttttcaagttttccggcagattccattcgattgaaaaagacgtttgccgggccggcgattaaatgggcatgcttcgactgaggcacgtacactaaaaagctaagcaagaacagaagatggatccaccatgcgatatagaaaatcaccgccgcgcctgttttcccgacaccgctaagcataaacgcaatacctgaggcaattggctcgctccaagaaagcccatgctcatgccaaatcagattcatcccgttcccaagcagaacggtcagcattaatcctccgataaaaatgagaacgagtccggctttgaaaccgcgtttcagcctcacgagcttttcgatataacgtctgtagaatgcccacccaacagcaattaaaatgagaaacgtaacaatttcctgaaaaaaggtgaaggcgggatagaccgggccaagcggcagattccggccgggagccagtcctttgatgataaagtcaattgctccgaactgaaccaatataaatccgtagaaaaacatgacgtgaatgattccgcttttcttgtccttgagcagttttttctgtccgaatacattcacccatatggcgtgaagcctttccttgaaccgttgatcaaattgttctttctggccgagcttgatgtaggccagtctcgttttgaccaagtacacaaacaaatagacaacgtaagcggttacaatcagaaataataatgcatttgcgatgagaaagccgctcattccaattccccctttttactgataaagaccgcgatcccctacccccgaatctgtataagattatctttatgataaataatgaatgagtgttcagtcaataattaaattcctgctgttcgggcacactacctttactacggaaaggagtgccggtatgaaggtatttatcgtgattatgatcattgtcgttattttctttgccttgattctgcttgatatcttcatgggccgtgccggatacagaaaaaaggcgtacgagcctgttttttcaaaaaagaagagtgacatcgaattgatccactgcggcgctgatctcgttgagcggatgatgaatgatattcgccaggccgcctcttctgttcacatgatgttttttattatgaaaaatgatgaggtcagccacaatatgtataccttgctgaaaacaaaagcccaagctggcgtatccgtttatttgcttctggattgggcgggctgccgggcaattaaaaaaacggcgctgcagacgatgaaaaatgccggcgtccatgtccatgtgatgaatcgtccccgttttccttttttcttttttcacatgcaaaaacggaatcaccggaagattacggtgatagacggaaaaatcggttatatcggcgggtttaatatcgccgaagaatatcttggaaagaaagcgaagttcggcaattgggaggattatcatctgcgcatgatcggagaaggcgtacatgatcttcaaacgctttttgcttctgatctaaaacgaaataccggaatcgaactgggttcggatgtttggccaaagcttcagcaagggactatttctcacaagatatatgcgaccgacggttattcccttgaaaacatatacttggccaacattgcccaagcgaagaatcgccttacggtttgcacgccttattacattccatcaaaaccgcttcaagaggcccttattaacgcaagaaaaaacggcgtatccgtgagaatcattgtaccgatgaaatcagaccatccgctggtacgagaagcagcttttacgtattattcggagctcttggatgccggctgccttatttatcgttattatcaagggttttatcatgtaaaagccctcatcatagacgaccatctcagcattatcggaacagccaacttcgataaacgaagcctgttcttaaatgaagaggtgaatgttgaaattgatgacgaagcgtttacaagtgaagtctatgccacaattgaggaggatatgaaaaagtcggagctgctgacgatggaggatttcagcaagcgcacattcaggcagcgcccggcggaatggctcggcagggcattatcttatttcttataaaggagagttcctatgattttcagattcgggttcgtttcaaatgcgatgagcctttgggatgcgtctcccgctaaaacattgacattcgcgcgttattcaaagctttcaaagactgaaagaaaagaagcgcttctgactgtgacaaaagccaatttgcgcaatacgatgagaacccttcactatatcatcggccacggcattcctttgtaccgtttttccagttcgattgtgccgctggctacgcatcccgacgtgatgtgggattttgtaacaccgtttcaaaaagagtttcgggagattggagagcttgttaaaacccatcaactgcgaacaagctttcatccaaatcaattcactctgtttacgagcccgaaggaatccgtcacaaaaaatgcggtaaccgatatggcgtatcactaccgcatgcttgaggccatgggcattgctgatcgctccgttatcaacattcatattggcggcgcttacggaaataaagacaccgccactgcacaatttcatcaaaatataaaacggctgccgcaggagatcaaagagcggatgacacttgaaaatgatgataaaacatatacaacggaagaaacgcttcaggtctgtgagcaggaggatgttccgtttgtctttgactttcatcatttttacgccaatccagacgatcacgccgacctgaatgaagcactgccccgcatgatcaaaacgtgggagcggatcggccttcagccaaaggttcacttgtcttccccaaaatcggagcaagcgatacgcagccacgccgattatgttgacgccaactttttgctgccactgttggaacgctttaggcaatggggaactaatattgatttcatgattgaagcaaagcagaaagacaaggcgcttctccgcttgatggatgaattaagctccatccgcggtgtcaaacgcatcgggggcggtgcgctgcaatggaagtcataaatgtgcaaaaataggtttacgacttgtcagctttgggaacttaggctatataagacaacaatcgatggaggagaaagatcatgaaaaatatcaagtctctgaaagtagccgcacaggcctttactttaagaaatttgattcatctttataaaatgtgccattccggaagccacgaggtttatatttattcaaagaaaacgatgtgcaaaatcaaaagcttaattgagcttgaaacgttccgcatggctcataatgaaaaggaatatctgatcgtagttgaaggaacaaaagcatcacagctcattgaaaaattccaaaatctcatcgagcctgctgagagagaagcgctctaacttacatacaaaaaaggatagacatctgtctatcctttttcttatgctcttacataatggagctgaaccgcttgtccaaattgttttgtcccttttaaccgcagttttgtttcatttgttagttcgtgaaacagcgggatgccgcttcctaaaacgacgggaataacagtgatgatgaattcgtcgatggcatcttctttcataaagtcattcacaagctctgccccgccagctatccagatgtttgagcctttttcctgtttcaaacgggcagtgaaggctctggctccctcattgataaacgtcacatgttcatcttgataactgtcgggcgatcctgtaaaaacatagcaggttttatcctgatacgggaaaaccggtgttagcactttaacgtgctcatatgtgctccgccctaaaatgactgtatcaacagtctgataaaaatcactgtagccgttgtcaccttcaccttcaaattcatccagccaatcgatgcttccatcttcttttgcgatcatcccgtccaatgaaacagcaatgtacagcacagtttttctttccatgttctcctcctatcgatgcaccatttgcccgaattgcgcttgatgcagcctgctgtataggcctccggcttcgatcaggtcttgatgacggccttgttcttcaataccgttgtttgtgacgactacaattctgtccgcgtctttgattgttgccagcctgtgggcgatgacaagcgtcgtgcgcccctcagacaactcttgaagcgccttttggatcgccgcttccgtctctgtatcaagggctgaggtggcttcgtcgagaatcaagatcgacggatttttcaagaacatccttgcaattgacagacgctgtttttgcccgccggaaagcttcacgccgcgttcgccaatcatagtatccaacccatcgggcatgttatggacgagctcttccagatgcgcctgcttcacagcttgccaaatgtcttcttctgatgcgcctagtcggccgtaggcgatattttctctaagcgtgcccgagaataagaaaacgtcctgctgcacgacgccaatctgcccgcgcaacgaagaaagcgtcatgtcttttatactgatgccgtcaatcgtaatgtcgccctccgatgcttcataaaaacgcggaagcagactgcaaagcgttgatttcccagcacctgacggaccgacgaacgccaccgtttcccccgcttgaatggataggttgatgtcattgaggacattgtgatggtcatcatagccaaacgaaacatgtttatagcggatattgcccttcaggccggaaacatctctcgcatcaggtgaatcctgaatgtccggctctgtctccatgagctccatatagcttttgaaacccgcgatccccctcggatacatttcgataatggcattaattttgtcaataggcctgaacagcacatttgtcaggagcacaaacgccacaaattccccgtacgataaggagccgcgaatgacaaaccacgtcccgcacaaaaggacaaacagcgtgacaaaccgggtcagcatatagctgattgacccgtttttcgccatgattttgtaggaagaaagctttgtgacacgaaaacgctggttgttgacggcgaagcgttctttttcaaacgcttcatttccgaacgcctgcacaagccggatgccgccgatgttattttctacacgcgcgctgaagtctccgatatccttgttcagcgtggtaaatgctttggtcatttttttgttgaaataaagcgctagccaaatgacgatcggcataatgataaacgttaataaagcaagctgccagttaataaacagcatcactccgaacgccccgagaatggtcatgaccgcaatgaataagtcttccggaccgtgatgggcgacttcaccgatatacattaaatcgttcgtaagcttcgacatcagcgttcccgtcttgttgttgtcgtaaaatttgaacgagagcttttgcaaatggtcaaaaagcgactttctcatatcagtctcaatattgataccaagcatgtgtccccagtaggtcacgatatactgaagagccgagctgagcgcgtacaccgcaaataacccgattgaggtcgcgatgatcagcccccagtccctgcccggcagcaaggtatcaataaaataattgacaatcaaaggaaaactcagctccattaaacctcccgcgatcgctgagaaaaagtcgagaaagaacaacgttttatatggtttataatatgaaaaaaattgccgcagcaccctatcttcccccaatgtataaataactgataatatttctcaattatactatacacgggctgttttgaaagatcagatttcttttttcttacagaacacctgaaaacaggcgggcaaatgactcttttgtccggtcagccacgcctcttttataaaagccgacagggctgagcttttcactttcctgcatatcctcttcaaaatggacctcaagggttcggatcgcttcggcatccgtgaagaacacattcacttcaaagttgagctgaaagctgcgcatatccatattcgcggtgccgacggaggcgagatcgccatcaatgatcatgactttttgatgcatgaagcctttttggtaggagtacacttcaatgccctcaaggagcagctccgggaaataggacctcgacgcgtattgggtcaaaaagctgtcgttcttctccggcaccataacccttacctctaccccctttgtcgccgctgcttttagcgccgtgcgaatggattcattggggacaaaatagggcgtggcgatccatattgatttctgcgctgaagaaatcatttcataataaaggtcgctcatgctttctttcatgtcagggcctgtcgcgacaatttgataaatgcctcctccttccacgggaaccggggtattgtactcctcttgatcaattagcacttcattggagacgtattcccaatccagcataaagatagcgtggagcgtttgcacaatttccccctcaagccgcaggtgtgtatctctccaaaatccgatgtgcggatctctgctgatatattccttcccaacatttaatccgcccacaaaaccggttttcccatcgatgatcacgattttccggtgatttctgaaattcagcttctggttgaaaaacccgtatttcagcggagaaaacgggacgatgtccacccccgcttgtttcattctcataatatctcttcttgccagcttcatgcttcctgccgcatcgtataaaaacctcacctcgacaccctggcgcgctttctccatcataatatccatcatgccgcgtccgagcatgtcagatttaaacatatagtattcaatatgtatgtaagattccgcttttctcattgctttgaaaatgtccgggaaggtttcttcgccgtttttcagcactttgatgttgcttttcgtattgatattcatatgggcagccctgatggaatatgtaaagaacctctcttgattgtccttcagccctgtcacttcgggcgtttccttcttgtcaaacagcttcctgagcttttccctgttgtacattcgttttgtcttaaacagctttccctttacataaagctgtcccgaaaacagataaaacacgtagccgacgattggaaaaaagacaagaatatggatccatagcagcgtgtgctgcgaggtgcggttttcaagaattaatgaatagatgctgaacaaaataatgcttatatagcaaagcaatcctccgtaaaactcaagcctggaaaccggaaaaaaccaaatgacatatgccccgatgagcatcatatataaaaagaaaaattccagtctccttttcagcatcctgattctctccaatctgattcaattacctctgtattacctcttttttctaatcgataaaccttgtaagtaaataacctctccgccgaaggaggagaggtttagaaaaactaactgtcacggaattcatccgcatcgtttctgcagaaataaagcaagactattggcaacgccgagtgaagtctgatgatacaacatgagcggcaggccgaacccgctcagcactccggcaagcgccgaaaaagaggcggcgctgtgactgcaaatacggtggatagagtgaatttgatgcccactctgatgagagaaaatatataaaacgggatattgatcagaaagatataaggagttagtcaggctgagtcataatctgctgttccgccggtttaaaatgagtaaaatccgttttattcttgatcttatttccaaatacaaacacaacaggattcccggccgcccagccattacctttgcagaaaaaaccccctcctgggggggattttcatgagcgtttccgatatacaacgtagctgcgggtcagatacttgagcggcagactgaacacatgaaccaatcttgtaaacggccacaggataaaaacgacgtatcctatcacaatatgaaacttaaaccatagcgggacactctccatcaaagaggcgtcaggccggaacaaaacgatttccctgaaccagggcccgactgtggtccggtaatcaaatcctttcgaatcaatgttgagaaacgtggccgcaacgcccgacagcatcatgaacagcagcaggagcagcgtaaggatatcggatggcgagctcgttttgcggattcttttgtcaaacagccttctgtacgtcaggatgacaagtccggtacatgccgcaatgcccgccggcaagccagcgccaatcgccattttgtgatacatatgctctgaaatgccaagggaagcatacacgccttccgggatcagaatccccatgacatgcccgccgacaacgcacagcagtccccagtgaaaaagtgtgctgcccgccgcaagttttttcttttctaacatctcgcttgatttcgccgtccagccaaattggtcatgctggtagcggtaaatatggccgccgataaagattgtcaatacaatgtatggcataataccccagaggatctgcccgctcatgcctgaacagccccttcaacgctttcacgtacgccaatgttttcaagcgcggccagcagcacgtgcagcagttcagcgtatatactgtcatttttttcgagacgggatgccagctccctcacattggacagatatttctcaaacacgcttctcgctgcttcaatttctgcagccgcagcaaattccagcatcagcggcagataatcaggcagctctttctctgtcggcaggaaaccggattgctcgtatgtgttttttaaatgcagcaattcaacgccgcgttccctttgctcgcccgagttaaagtaggtgacatacatatttgtttttttcccaaagtcgaacgtatagacatagtgttcaatcagcgcttccggtgaaaagctggctgacgcctcgaaaaagtgcagcagcttctcccggatttgccggttgctgatttcatggataagagccttccaatcgggaatctcggctctccactcttcatccggataagagagaagagaggaaagagcggagaacgtcatttgccggtctgtggtgttcatcttgttacacctcatttatcaaaagttagaaacaggagccggggccgcctgaaaatgataagccgcagctcccttgttcagcatataaatctgaaacttcttctcgatgactgctcggtatcacaaagcggtcatcatatttggcaatcgcaagcagccgatacatatcttcaatttgctgttctgttaagccgacactggagatcagttccggatcgattgatttattcgtctggatcgctctcatatactggcgcatgacagacattttctttaacgttgaccgaatatgatccgtatcaccggctgttaacagctgcgccaaatagtctatcgggattctcatttggtcgatagccggaaaaatatcttccgcggattgccggctgccttttccttcaaagagattcataatcgggctgagcggcggaatgtaccacaccatgggcagcgtgcggtactctggatgaagcggcagcgcaatcttccagtcaatgatcattttatagatcggcgattgctgcgcagcctctatccattcagccggaatgccttgttcttttgccagcttggcaacctcaggatcatttggatcaagaaaaacgtccaattgggaatggtagagatccttttcattttcaacagatgccgcttcctccactttgtccgcgtcatacagcatgacgccgaggtagcggattctgccaacacacgtctcagagcagatggttggcagtcccgcctccaaacgcggaaagcagagtgtgcatttttccgctttgttcgtttgccagttaaaatagacttttttataaggacaggatgagacgcaatatctccatgaacggcatgcgttttgatccacaagcacaatgccgtcctcctcgcgtttgtacatggcgccggatggacaggatgagacgcacgccgggttgatgcagtgctcgcaaatacggggcaaatacatcataaagacctcatcgaattctgttttgatcgattcctccatcttttgtacgttgggatcttcaagtcccgttatgtggccgcccgcgagatcatcctcccagttcggtccccattcgatattcataaaatcccccgttaaggacgatttcgggcgtgctaccggctggtgttttttctgcgggctgttcgttaatgtttcataatcatagttccagggctcatagtaatcatcaatcgacggctgattcggattatagaaaaggcctgcaagccgattggttttcgagcccgatttcagctcgagctttccttttttcaatgtccagccgcctttatatttgtcctggtcctcccattgcttcgggtagccgatgcccggctttgtttctacattattgaagtacatatattccgcaccggaacggtttgtccacgtgtttttgcaggtgacgctgcacgtgtggcagccgatgcatttatccaagttcatgaccataccgatttgcgctttaatcttcaagccaatcgacctccttcagcttgcggatgacgacgttcaggtcgcgctgattccccgttggaccgtaataattaaagccgtagctgagctgggcgtagccaccgatcatctgtgtcggcttgacgtgaatccttgtcgggctgttatgggtgcctccgcggttattcgtcagctttgtgccgggcacgttgatgtggcggtcctgggcatggtgcataaacgccattcctttaggaatccgatgagacaaaacggctctcgcgacaacaacaccgtttcggttaaagcattcaatccaatcgttgtctttgatatccgtgtcctctgcatcatctttattcatccacacggttggcccaccgcggaacagcgtcagcattggcagagaatcaaaatacatgctgtggacagaccatttattatgcggcgtcaaataattgaggacgatttcttttccctcttgatcaggccgcttgctcagaaacgggcgatgctggaggatcggtttgaatgtcgccatcgtttcaccgaattccatcatcagttcatgatcgacataataggattgtctgcctgtcagcgtccgccacgggattaatttttcaacattcgtcgtaaacggcgaatacctgcgccctcctttttcagagccggaaaacgctggagacgtgatcaccgttttcggctgggctgtaatttgttcgaacgtaaagcactcttcctcgcgttcttccgccaggtctttcagcttcaggttcgtgatgttttcaagtgattcccatgctttgacggcgacctttccattcgaagtggatgatagggttaaaaccgcttctgccgcctgctttgcttcacttatatttggacatccctttgccacgctgtctgaggtgatttctcccagtctctttttgagtgattcatattcatcggctattgaccagctcatcccttttgttccgctcggctttaaagcagcgttaggaccgagtgcggtcattttatgaaaaatgtgtttgtaatcccgttcaacgacttggatgttcggcatcgtttttcccggaatggcttcacattcgcccttgctccagtcattgattttgccgaatggctgggccaattcctgcatggtgtcgtggaggagcggcgtcgcaaccacttctttcaccggctccatattgacttcttctgccagatcggaaacggcttttgacagcgccttgaaaatatcccagtctgacttcgattcccacggagctgagatcgccggagcaaatggatgaatgaacggatgcatatctgtgctgctgagatcgtgtttttcataccatgtcgccgccggcagcacgatatcggaatacagcgccgtacccgccattcgaaaatcaagattgattaataagtcgagctttccttccggcgcctgctcccgccatttgatttcttctgggcggatgctgtcgctgtcgtcattcattaaaccgttcgttgtccccagcaaatgcttgagaaaatattcatgcccttttcctgagcttgagatcagatttgcccgccatacaaagagattccttgggaaattcacttcattgtcaggatcttcaatcgcgaatttcagttttttctcttggagctgtgaggccacgtacgcacctacgtcttcaggtgttgctgcccctgctttttcagcttctttatacagatcgatgccattttgattgaaagtcgggtaagacggaagccaccctagccgcgccgccagcacattgtaatcagcgtggtgcttgtagcgggatgacgcagcaatcggtgatgccaaatcactgatcggctggtcctcataacgccactgatctgtcgcaaagtagaaaaatgaagtgccgttttgcagcttgggcacgccctcccagtcctttgcagttgcaatcgtctgccatccttcagcaggtcggagcttttcctgcccgacgtaatgggcccagcctccgccatttacgccttgggcgcctacaagcaaaacaagatttaacactgctcggtagatcgtgtcggagttgaaccagtggttaatgccggctcctacgataatcatagaccggccgtctgtatcgatcgcattttgagcaaactctctggcaatcttaacgacagcttcttttttgattcctgtcatttgttcctgccaggcaggcgtaaacggctcaggatcatcataggagacagcttgttgttcgccgatgccccgatttacgccgtagttagccagtatcaagtcaaacacggtcgtgacgtacgtctcttcaccgttcaggttcatttttttaataggaagatcccgctcgagcactttgtttccgtcatttgaaaaatacgggatgcgcaccgtgccgatttcatcctctattccgagcacagagagacggggttcaatcggttccccggtttcttcatcaatcatgtgcaggttccatttctgctgcccgtcccagcgcgagcccattgtcccttggggtatggcaaatgaacttgtctgttcatcccaaaccgcaggcttccactgatcatgctttgtcttccgcccgatgtccttcgcatgcagaaaccgtcccgctgtgtatacgccattttcttttgacagagtgacgagaaatggaaaatcagtgtattgcttcgcgtactcaataaaacgttcagtttcttggttcacgtaaaattcctgcagaataacgtgacccatcgccatcgcaagcgccccgtcagtcccttggcgaatactcagccagtcatccgcgaactttgaggattccgcaaaatctggactgatcgaaatgaccttagcgcctttatagcgggcctccgccaaaaaatgcgcgtcaggcgttctcgttaacggaacgttggagccccatgtgataatatagccggaattgtaccaatcactgctttccggaacgtccgtctggtcaccccaaatttgcggggatgctggaggaagatccgcataccagtcataaaaactgagcatagggcctccgattaacgacataaaccgggagcctgatgcgtggctgatcatggacatggccggaatcggagaaaaaccgacgtttcggtcaggcccgtatttcatcactgtatacagcagagaggctgaaatcagcttcagcacctccggccattcagcgcgcacaaaaccgcctttccctctcgcctgtttataggacttcgctttttcagggttttcgacgatcgatttccaggcttccaatggattttgatgcgtctgcaatgcctcccgccacaaattgatcagcacaccgcgcacgtatggatatttcacacggagcgggctgtagatataccatgaaaaactggcccccgcgggcagcctctcggttcaaaatcaggcatatccgggcctgttgatggataattcaaattttgcccttcccacgtgacaattccgtttttcacataaatattccagctgcaagaccctgtacagttgacgccgtgggtggagcgaacgactttgtcgtactgccatctgtttctgtatacattctcccaatcgcgatcctcgcgggtagtttggctatgtttatttgaatggtgttcgataggagagaaataattcaatctcctaaacaacggactcattttctttttcttcatgagagttcactccttccgagtcaggtgatgctaagttcactataaacagagacagcgtgttttcttgtgaactatgtcacacactctgcttttttcacaaaatgttcacacaaaggagaaggaaggctgagttcaggcaggacgcttgggtcattagctgcctttcattcaaagatcaaaaaaaaccggctctatttaagaaccgggctcggcgttttcatcctgtgatgtatgcagataccgcaaaaataattgataggaacaaaaaacattttgctgaagcatagccaaaaagttcatttgcagctgcggatgataagacatcattttcttaaatatgtaatatgggatgttgagaatcagaatgtctgaagtggcattgactgagataaagggcgataaataaagcccgcctttttcatcaatcggaaacacatcgcctttttcccacagcgcaacggttttcgacccttcagggagccttgtgtccataaaacggacactgccttttaatacaatataaacagattgagaatgaagaaaagatggagactgatcacatgaaccgcggataaacgtgccgtttttcagcaaggtttcgacaatggatagaggcacttcattaaacataggaagttgtttcagaaataataaatagtcacactgattcataggaaaacctcctgtgctaagctaaggatagctttagtgtagctcgactgagcctgtacagcagtgatgtatttcacagcctgtatgatgaatgtcacttatcaggagggtgaatgcatttataatgaaagaaaaaaggaggatttcgatgaaggcgctgattccgaagcagcacggggcgtgggcgatgctgctgatcccatttttactcggcatggtcaagggaggccccgttatttggcatattccgctcttcctaggctggcttttcctatacttagcggtttatcccgttacgcttgccttaaaaaagaaccaaagcaaaccttatcaaaagtggatgtgttattacggttttcccgcctgctgctttttgatgatctcggtctttcataagccgcctctcatctgggtgggcgtttctttactgccgctgtttctcatacatatgtattttgcccgcagaaaaaaagaacgagccctattgaatgatgttgcaggtgtcttgttcttttgttcgggcgggtttgcgagctgctggctggggatgggaaccctcgacggctgggcttggtttattttcttgcagtctgctttattttttatcgggagttccttttatgtgaaatcggtgattcgtgaaagaaaaaacaggacatttgcatactggtcatggggatatcacctgctgctcccctttttatccgctcttttcggagcaggatgggcgtttctcgcttttatcccgagcagcttgcgggcatggttttttcatggaagggattggcccgtaaaaacgattggcattctggaaatcgtgaatgcctgtttctttcttgccgtcatgtgcctgtttatcacaaggtaaaaaaacaaggacaccgctgtccttgttttttcagtcaatattgcaaatctccagcgggcaattttcacactcaatctcacatcgtaaatagtcccgcttgtgcaaaataatttttccggattcgtctatcgaaataaccccttttttgcggagatctcccagcatacggttgatgctttcccgtgcagccgcacaaaactttgccaaatcctgatttgtcaggacaatgttaatcagaatgccgtcgcttcgctccactccgtagctgtttgataagcggataagggtagaatagagcgccccctttttgccatgaagaagcagatccctgattttggactgaatcttccggaggtgcgtgctcatccatttcatgaactcaaatgtcaaagcgccgttttggattaattctttttccagcttatttttattaatgacgagcacctcgccatcctctagtacttttgcactgagcatataccttggttcttcagtgaaaagtgttaattctccgacgatatcatgcttttggcagattctaagcgtcaggtcttttccgtcagatgtcagcttgccgatttcaatgagtcctgattgaatcagataaagctcttctgcatccattccttcccgaaacaaatacgtgtgtttttccatttttcttttcgtgctgatcgattccagcaattcatacagatcgctggatatatgatcactatcagatggtcgaacagagagaaaattcatgagctcacctcgaagaaagtcacgttgtgtgtttattgtaacgtgaattgatttgtacccatcgagaaaaaactaacaatcttgtgaatgccccagtgttagttgatgctctggctgtttctctccgtgtgtgttttcattctttcctgccaatacatccatatgacaaggacaaaactggctaacgccacctctgaaagcgccataaacccgatcgcgtactggcctgttgcctgaaatacactcgccaatatgagcggaggaaaaaagccgcctaaaccgcccatggcagacacaatcccattggcaatccccgcttgcttcgaaaaatagaaaggaaccagtttaaaaacagtcccatttcctacgcctgagcagacggccacggttaatgatccaaacgtataaaggccgattgtcggcgagaacgataggataatgcctgataatgtaagcccggcaaaaacaaacatcaagatgcggagcgggctcattttatcagccaggaatcctcccgcaggcctgagcagcgtagaaaccgcaataaagccagccgtccgcaagccggcatctgcaggattcagcccaaaatgctccaccagaaagttcggcagatagatagtgaaggcgacaaaggcaccgaacgtaataaaataaaacaggctcagaaaccatagcacatgatttcggtaaacagctttgatttgagtcttaacagaaactttgaccttcttctcatgcctgtcgccaaacaatacgtgcagtaaggcaaagacagacagcaaaatcagatacatttgcacggttgatttccacccgacggcttgagcgataaccggcgctgcaaatgtcgtaacggctgtcccgatatttcctgcaccgtaaatcccattgacgacaccgtgcttttctttcggataatatttcgggagggaggtcaccccaatggaaaacaccgctcccccgatccctaagaaaaagccgcctgcgattaaatcaaacagagaatccgcgatactgatccaaaatacaggaaataaaagcaggatgaaactgaccataaacatgagccgcgcgccaaacctgttcgttaaataccctaaaggaatgcggagaagcgacccgaggatcacaggaatcgccgtcaccaaagaaatctcacccttgcttaaatgaatatctaatgtgatttgggaaatgagtgatgaaatcagcacccaaaccataaaccctgccaccaagcttaatgactgtaacgataattgaatgtgttgacggttgatcatttggcttgcccctttcaatgattcaataatcagtcttatcatacaaaaactcggcaaacaggattgtgaattacatcacacgtttttctcataaaaaaaggacaaagcccgaagactttgtccttttgatcgtgattacattttttccggagccgatacgccgatcagctgaagcgcattgttcagcgtaatttgcgttgccttcattaaagccaggcgcgcgcggctcttctcttcattttcagggtcgatgactttctctgcgttgtagaagctgtgcagagcagaagccagatcataaatatagtttgtgacacggtgcggaattcgtttttccgctgcttccgccactgcctctgggaagccgccgatcgttttcagcagatcgtattctttttctgattgaatatggctgaaatcaagatctgccgccggtttaagtccctgctcttccccttggcgaagcatgctgcaaatacgggcatgcgcgtattgtgcataatacacagggttttcgttagatgttgatacagcaagatctaagtcaaaatccatatgggtgtccgcacttcgcatcgcaaagaagtaacgaacggcatccaagccgacttcttctatcaggtcacgcatcgttacggctttaccggtccgtttgctcattttcattttctcgccgtttttgtaaaggtgaacgagctgaatgatttctacttcaagcgttcctttttcatagcccagcgcttcaattgccgctttcatacgcgggatgtagccgtggtgatcggcgccccaaacgttgatcagcttatcaaagccgcggtcaagcttgtccttatgatacgcgatatcaggaagcaggtacgtgtacgtgccgtccttcttgatcaatacgcggtctttatcatcgccgaacgtcgtggaacggaaccaagtcgcgccgtcttcttcatagacatggcctttttcgcggagcgcttcaagcgccgtgtcgatttttccattttggtacagtgaagtttcggaataccacacatcaaacggcacacggaagttttccaagtccttgcgaagcttgtccagctcgtatttcaggccgtattcacggaaaaacgcgaggcgttcactttcctcttcgttaacgaaacggtcaccgtattcctcagcgagacgctttccgatcgcaatgatatcctcgccgcggtagccatcctccggcatcggtttttccaatccgagcgcttcaaagtaacggacttcaacagaaagcgccagattgttgatttggtttcccgcatcgttaatgtagtattcgcggcttacatcgtaacccgcttttgaaagcacgttgcacaaggaatcgccgacagccgcccctcgcgcatgcccgaggtgaaggtctcccgtcggattcgctgatacgaattctacctgaactcgttcaccgtttccgatgttcgtttccccgtatgcttcccctgcttccagtacagacggaatcagctttgttaaatattgattgttcatatagaaattgataaaacccgggccggcgatatccagtttttcaatcgaagcctttcctttatcaaaatgggcgacaatctcttcagcgatttggcgcggcgctttttttgccactcttgccagctgcatcgccatattcgttgagtagtcgccgtgtgttttatctttcggtgtttctaaaacaacattgggaatctggctttcttcagccagtcccgctttcagaacggccgctttaatttcttctttcagcacgtccttcatttgttccgcaatgttcatgcgtgagttcctccctcatacgtgatcgtcatattatgtaaatgctcctgctcgtctccgacatgcatgtcatatgcgatgctgatacggcctttttcttcatcgagatcagattgaatcgattttgtgcttgttttcagctcaagctcaccaaatgacattttatatttagcaattgtggaagctcccgttacgaaacgctgattcattttgacagcgcctgacctcatgaccaggacttcgccttcgcttactttcacaatcgttttgactttgcctaagtcgtgttcttcataataagatagatacactttattttgttttacatagtaaaatccggtggtgcggaattcgatgacttcttggtttccgtcatcctcgatcacagacttcacatggagtgttatcggtgtctcttgcttcattctgacacgtccttttcatcattccactttgacttgaatagtataatcattcggtttgtaaacttcaactgcttctatcttaccatcattgctcatcagatttgaagataaacctcataaaaagcatttccttatatagaagagaaaatcatatcactaattacctttaggaaatgttacatttttccgaaatctatcatttccttttcacatttttttcaaaatatatgtattgaattagtaatttgatagttttaagataaaagtacaacatagatctgctagaaaaacaaaaaaagggaggattcaattatgaaaaaagctgtcattgtagaaaacaaaggttgtgcaacatgctcgatcggagccgcttgtctagtggacggtcctatccctgattttgaaattgccggtgcaacaggtctattcggtctatgggggtaaggatctcccaaaagggcatagtcattctactatgccctttttaagtaaattacaatttttaactaaaatctacctcttggatatacatacacaaccgtttttcatttgaatcatatgtataggggatggtattttgtttatagagcagatgtttccatttattaatgaaagtgtaagggttcaccagcttcctgagggtggcgtgttagaaatcgactacttgcgcgataatgtctccatttctgactttgagtatttggatctcaacaaaacggcttacgagctttgcatgcgcatggatggccaaaaaacagctgagcagattttagctgagcaatgtgcagtgtatgatgaatcaccggaagaccataaagattggtattacgacatgctcaacatgctccagaacaagcaggttattcagcttggaaaccgggccagccgccatacaatcaccacgagcggaagcaatgaatttccgatgcccctgcacgccacctttgaactgacgcaccgctgtaatttgaaatgcgcccactgttatttggaaagctcacctgaagcgctcggcaccgtgtcgattgagcaattcaaaaaaacggctgatatgctgtttgataacggtgtattgacatgcgaaatcacaggcggagaaatttttgtccatccaaacgccaatgagattcttgactatgtgtgtaaaaagttcaaaaaagtcgctgtcttaacaaacggaacactcatgcgaaaagagagtttggagcttttgaaggcttacaagcaaaaaatcatcgtcggcatttctcttgatagtgtcaattccgaggtccatgactcctttagagggagaaaaggctcttttgcccaaacttgtaaaacgataaaattgttgagtgaccacggtatatttgtcagagtcgccatgtctgtcttcgaaaaaaacatgtgggaaatccacgatatggcccaaaaggttcgggatctcggggcgaaggcgttctcttacaattgggttgacgatttcggaagaggcagggatattgtccatccaacgaaagacgccgagcagcaccgcaagtttatggaatacgagcaaaatgtgattgatgagtttaaagatctgattccgattattccttatgagagaaaacgcgcggcaaattgcggcgctggctggaagtccattgtgatcagcccgttcggcgaagtacgtccttgcgccctctttccaaaggaattttcattgggaaatatttttcatgattcctatgaaagcatctttaactcccctctcgtccataaactgtggcaagcgcaggcgccgcgcttcagtgaacattgcatgaaagacaaatgcccgttcagcggctattgcggaggctgttacttaaaagggctgaactctaacaaatatcaccgaaaaaacatttgctcttgggcgaaaaatgaacaattagaagacgtggtccagcttatttaggagggaaacgatttgtcaccagcacaaagaagaattttactgtatatcctttcatttatctttgtcatcggcgcagtcgtctattttgtcaaaagcgattatctgtttacgctgattttcattgccattgccattctgttcgggatgcgcgcgcggaaggctgactcgcgatgagcattttggatatacacgatgtatccgtttggtatgaacgggacaacgtcatcttagaacaagtagatttacatttagaaaaaggcgccgtttacgggttgcttggggtaaacggcgccggaaaaacgacactgattaatacgctgacaggcgtgaaccgcaatttcagcgggcgctttacactgtgcggaattgaagcggaggccggcatgccgcagaaaacatcagatcagctgaagactcaccgttacttcgccgccgattatccgctgctatttacagaaattacggcgaaggactatgtgtctttcgtccattcgctttatcaaaaggatttttcagagcagcagtttgccagtttggccgaggcctttcatttttcgaaatacatcaacaggagaatttcggagctgtccttggggaacaggcaaaaggttgtattgatgacaggcttattgctgcgcgctcccctatttattttggatgagccgctcgtcggtttggatgtggaatcgatagaggtcttttatcagaaaatgcgcgagtactgtgaagcaggcgggaccattttgttttcttctcatctgctcgatgtcgtgcaaagattttgtgattacgcggctattcttgacaacaaacagatccaaaaggtcattccgattggagaggagaccgatctgcggcgggaatttttcgaggtgatcggccatgaataacataatccccatcatgtctttgctgttcaaacagctttacagccggcaagggaaaaaggacgccatccgcattgccgcaggccttgtcattctggccgtgtttgaaatcgggctgattcgccaggccggcattgatgaatcggtgttgcgcaaaacgtatatcatactcgcgcttctcttaatgaacgcatatatggtgtttctttctgtgacatctcaatggaaggaatcttatatgaaactgagctgcctgctgccgatttcttcacggagcttttggctcgcccagagtgtcgttttgtttgtcgatacctgtttgagaagaactttattcttttttattttaccgctgttcttatttggaaacggaacgctgtcaggggcgcaaacattgttttggctcggcaggttttcgttttttaccgtttactccattattttcggagttgtgctaagcaaccacttcgtcaaaaagaagaacttgatgtttctgctgcatgcggcgatattcgcctgtgtatgtatcagcgccgctttgatgccggccgccacgcttccgctttgcgcggtgcatatgctgtgggcggtgatcattgactttcctgtctttctgcaggcgcctccgcagcagagcaagatgcattcatttatgcggcgatctgaattttcgttttacaaaagagaatggaaccgatttatctcttctaaagcgatgctgttaaattacgcggtaatggcggcgttcagcggcttcttttcgttccagatgatgaataccggcatcttcaatcagcaagtggtttatatcgtgatttccgcgcttttgctcatctgctcgccgatcgcccttttgtattcgattgaaaaaaatgaccggatgctgcttatcacgcttccgatcaagcggaaaacgatgttttgggcgaaatatcgcttttattcaggcctattggcaggcggatttctccttgtcgtgatgattgtgggtttcatcagcggccgtccgatttcagttctcacttttttgcagtgcattgagttgctgctggcgggagcttttatcaggttaactgcggatgaaaaaaggccctccttcagctggcagacggagcagcagctatggagcggtttctcaaaatatcggtcttatctgttttgtcttcccctattcttagccacattagccggcaccgctgtatccttggcggtcattccgatagccggtctggtcatagtctattacctgcaaaaacaggatggtggtttctttgatacaagcaaaagagaacggcttggaagttaacctgctgaagactcatcaattttcaactatttcaatcgccgcgagctttctgaaaccgatcgaaagcgcggcggaacctgaggaagaaacgatttatttttacggcgccgccgcatacctgaaggagcaaattattgacgctttcggttgtgctgccggcagccgtttcatgtactcagcgaatctcttttttgatcagcagctgaaaacctgcgggacccgtttgattcacccattatataacgggaatcttcatgttgacgccctgctgaaaacttttgcagacttgtctttcccttcttctctttcattcgaagcagttgaaaaggccaggaatgagctgctgctgagaatcgaaaagaaattcactgatcctttctcctactcggcggcgcgcttggctgaggaggtcttcggaaacccgatgtacggcacaggcatgtttggccggaaagacaggataaaggcgattcatcctaaacggtttctcgacgcaacggactttatcgttgatttagtgtcccagcaaaaacagctgaacatattgggacaagtacaagcatgtgatgttcggggacatgccccgcaaacgtccgctgtaacgtccgaaagaatacccgtaaaccggcatgtttttgaaacagagacacgcagcgctgcaggtccttccgtcttgacactcggatttgactgcggagagatgaaagatgccagcgattatatcaaaatacagctaatagacggattactgggaaagtacggccattccgctttattcaagcacttcagagagaaggatctggcagtctatcacgttatcacccgttacgatgtcatgaacaatttgctgcttgtttcaatatgtacagatcagcttcatgagatagacattcccccgcgcgttttggaagctgtctcagcttttcatacagatgagcgggaactagaacaggcaaagcagtttttacgcaatgaattgctgctgcaattcgattctcccgaaggtctattggcctatatggggatcctgcgccgcttctcctgcacgaaagaagccttgctggatggcatctcagcggttacatgccgtgatgtattgcaattcatagcgaccatcaattatatcggagctcatgtagtaaggggatgaagagatggaaaagaaagccttttttcaacaactggatgaacgaaccgatatcagatacacagacagcggactaaaaatattcagattgaaattcccccgcgcccacctgcggctgtgcaatgtaaaaatcgattttggaagccgggatgtatgtatacgggcagaatccggtgatacactgcttccgtatggcacagcgcattttttagagcatcttctcttctggcataacggccgcaatctgtacagtgatttttttgcgcatggcgcgcttttaaacgcattcactacctacaccgataccaatttcatgtttacctcattaccggatcggctcagacaaacgatccccatcctgcttgatgctttatggaaccactcatttgacaagaagattgtcgctcaggaaaaagctgtgattacaagcgaaattcaaacagcacaccttaaccatcagctctcatatcattatcagctgatcagcatgctttctccctcctcaccagctgccgttttccccgcaggcagaatcgaagatattgaggcgctggacatcagtgatttacaaaaagcctataaggctgcctaccaagcccatcggatgacgctgtttttgattgggggctcagaaaatacagaaacgcttttgcctcctcacctccagctggaaaaacgtccggattatcatgctgaaagaaaaatcatcccggcatgccctccagccctctcacaaaaaatggtgctgggtgatgaggagcggatggaagatacatggaccggattacagatcggcgcacttcccgggcaaaacgatctgttggcgataaagctttattgggatatcgcggctcgtattctatttcaattagattcaccgttttttcaagagattcagcaaacgtaccgtctggaaatcgatcgcttgtcagccgagacttatatatatgaggatggcggtttcttgatccttcacagtcaagggacccattcttcagcttatatcgatgtggcttcatactatgtcacacagaagaaagaacaggttgccgcctggcttcaatacggcaaggactctttgacagacgcgatcatttatgacagcgattatgtgcgtaaatgcttcgagtgggcagccgagtgtgacaggtgcgattgctcgtttcttgacatgtaccacatcattcaagatatggatgcgcaggttttcttgtctctcattgatgcaatggcatcttctaacaaagcgatcattcacgtttctcagaaagaggcgatcagacaatgaaaaaaagcactgtctttacccttttattgctgcttataggtatggcggcttattccttcggatgggttcaggccgttgccgaagccgccgcccaatatgtacagatgatcaacaatgatgctgttcggctcggactgctggcttgtaccgctgccctcctgatgctgcctgcttttctatatcttcattatgtcacccaatccgtgaaaaacatgacagcagcttttcagaaactcacacagtctcatcaaagctgctgtgactttcagcaacacaacttgtgcagccgatatgcagaagacgtcaaatcgctgcgtgacagctataaaaacgtccgccaaacatacgtgatggctgccgtgttgtgccaagtcatcatattcggctgcatgttcgaaatcgttaaagccgtccctttccgccttcacacgccccctgccctttcaatgggacttgcgatgctactgattctgtatttattgttttgcatgcgaacttatttgcggcagcttttccggcacggcagcctgttcagaaaagtgtttgcgggagcgctggcagcagccgggatttggtggatactcagtttctctataagtgaactgctgtttctgattatcctggctaccattcagcaaatcggatcatttatttataaacgattctcttatcgcagcaccgcttctcttgatctataaaatagctacatcgcaatcgcagacggacccgcgccaaccggaatcaccgtcacggctgtataatcacttgtgcggtacacggtcacagcattgtcgttgggctgtgccgcataaatatactgtttgtccggcgttacggcgaggtcaaaagcgccggggagagacacgtttgcaatgatcctctgtctggccgtattaactacatataagttattaataagaaacggttcactatatggctctagaaaataagctctagtgctatcgagagaaaatacaatcgtcctcagcgtttcaaataaacggctgaagtcccctcccctgcttaatggagacaaactaatctccgttacacctttcggccacagctcaccattcaacacgtacgcaaaatttccagcgtaaggagttgcaattaaactgggaaattcaaatgtatctatgatactttctaccaactgcccagtatttatatcatatttatcaaccgaccaactgcttccattagcggtatagacatactgtccattcggatcaagagcaaagtctaaagcgccgggtatcggaatgacatcaatgaccgattgagaggccgtgttaatcacatatatagatccggcggccatcacgtatgcgaactcatcttttggatcaaattcgatctttctcggccctcctccaacagtaatggtatttatgatggttaatgttttattatcaatcactgagacaaggttggtatttccatggaggacatacgtgaatgctttatcgaaagtaacgcctagattagttggcacgtcagaaaaagggattgtttttacaacagtgtttaaatctgcatcaataaccgaaaccgtgctgtctccagtattggcagtaaacacatacgattgagggtctggtgatggcggtaaaacaagtgtcccggtcaccgtaagcggactgccgtagaaaggcggtacaatgagcagatcttccactgttatttgactgaaatcaggacagcggccagactgtgctgcataataaacaacttgatcaatctcttcggtatgaatcacagaaaccgccccattgccttgtccatattgatttcgcacaggcgacacactgacaagaagcgtaatggtcccttgtactctcacagcatatcgaacaccgatatcttctggttccggcccagtctggattaagcaaggctcactgatacaggacacattgtctgtactccatgtaacagccgctgacgcttcggccgaatcaaccttgaagccctcagggatatctatcggcacttgaaacggcgcttctcggctaatttcctcatcacaaaaacagaaacaattttcctgtaaagcagaaagatcattctttttcatgatttcacgtccttttagaaatgcacaacatgcagcggttaaatcgtaatggcacccggtgaaaccccaagagatatcacagtttcctcagaataatcatctgtgttgtaaacaatgatgctctgctctataaaacgagttgcatacagaaaatcgccattcggggtaaacgcatagtctgttgctgattgcggaagatttccaattacacctgctccattcggactgacagaatataaattgccagtgaagctgtcatgtaaatacacctctgatccactcgtaaacattacatatagcccgtcaggctccagctcttgggtatccctgatcgtaaacgtatttaaatcaataaccgtcaaataattgaataagaattcttgttctaatacatacgcataccgctccgtagaatctgtttctatggatgatacgataagctctcgttcaatcgttcctaagacttcaccggtagataagtccactttttgcactaacccaaaattaagaacataggcgaacaacccattggggtcaattgcaatatcaaaaccttctacaggaatagacctctcaacagtcaacgtatcaattccaatcacataaatggcagtaccggtgaaaacataagcaaactcatgattagggataaatctaatcaatcgaggcggctgatccagcaatatagttgctgtcactgttaatgtgtcataatcgatgacagaaatcacattattgttgggatgtaagacaaacacagcgcttttatctggcgtaatttcaatacctgccggattgtacggaagagcaatcgttgtcacaacagaatgagtgtttgtatcaatcacagaaactgattgatcatttggattcgctgtaaacgcataaacgggttccggctccggtacaagcacaatcgtccccgtcaccgataaaggactgccgtaaaacggcggaacaacaacaaggttctcaatcgtgatgtcactgatatccgggcaatcatccggttcatcggaataatagacgacttgatcgatttctgcattgtgaatgacggaaacagccccgtccccttgtccatattgatttcgcacaggtgagacactgacgagtagcgtaacggttccctgcaggcgcactgcaaattgaacaccgatctcatcaggctctggccccgtttgaattaagcaacggtcactgacacaagaaaggctgtctgcattccacgtcacgtttgcaacagcttcagccggatcaacgacaaatccttcaggtaattcaatcggcgcttgaaacatggcttctcggcttgcttctccctcacaaaaacataagcactcttcttgttctgctcctgctttttctttaaaggaaagcttgttttttctcattccttcacttccttttcagacatacactgctcacgcagatataacagaatatggaagtgtaacgtgtttgcttgtacaaattgctgagggtaaacgcttctttttgaaaatatatctccaaacatgcggtgtaacgaaagaaaaaattgcggtttttttgcgcttctcacaagaatgttgatgataaaatatgacatatatagaattatgaagggagggatttgcaaacgtgacaggtgtcatatcttcttcttccatcggagaaaagattaacgaatggtatatgtacatacgccgatttagcatacccgatgcagaatatttgcgacgagaaatcaagcaagagctggatcaaatggaagaagatcaagaccttcatttgtactattcactgatggagtttcggcacaacctgatgcttgagtaccttgaaccgttagaaaaaatgagaattgaggaacagccgagactgtctgatctgctgcttgagattgataaaaaacaggctcgtttaactggtctgcttgagtactattttaatttcttcagaggcatgtatgagctggatcgccgtgaatatgtattagccattcaattctttaaaaaagctgagagcaagctggtttttgtgaaagataaaatcgataaagctgaattctttttcaaaatgtcagaagtctattattatatgaaacaaacttatgtctccatggactatgcacgtcaagcattcgaaatatacagtgaacagactacatatgatatcagaatgattcaatgccagtccttattcggagccaactttttggatttaaaacaatacgaaaaagcaattgcccattttcaaaaagcctttacacttgcaaaaacagagcagaagccccaattaatgggaagaacactttataacatagcactctgcaagcaaaaccaaaacagttttgaatcagcgatagagtatgtaaaaaaatctattcaagtatttgaaggatctaaaatgctcccttcactgccacaagcttttttcctaattacacaaatttattttaaattaggtaagattgataacgcctgtgaatatcataaaaaaggaaaagagtattctgcagctgcgggagataccgtgtatctaacggagtttgaatttttggaatctttatacttgtctggaccggatgaggaacggatagaaaaatgttttgtttttcttgaaagtaaaatgatgtatgcagatattgaggacttcgcacttgatgttgctaaatattatcatcaacaggaaaattacaaaaaagcatctcattactttttaaaggttgaagaagcaagacagcacattcaagggggggtgaatttatatgaaatggaagtataaattattactcgcttgtttagctgtgagtgctgtatttatcacagtcgaagtatcaaattcatcaacagaacattttgatgttgcgcaacgcgccatgatctaaaccgccgtccatcggcggtttttttgtcccctctttacccaatctcccaattcatgctgtgatttttttcaataatcttgaagagagtggaaatgcagcatgtctctgtaaagtgtgagaacccactttacacagtggaatcgagaaaatgatgtgacggagttcgaaacgtcgagcgcgacagtgttgaacagacagctgagacgatcggcgtaagcccgactagaatcgccaagaccctgtccttcagaggggaaggagatcaggcgattctgattgtggcagccggcgatgccaagattaataacaaaaagttcaggcaaacatttggctttaaagcaagaatgctctctcctaatgaggtactggagcagacaggccatgaaattggaggtgtttgcccatttgggttggctcatgatcttgaggtttatctagatgtatcgctgaaacggttttagactgttttcctcgcatgcggcagcagaaactccgctattgaggagaattatccgaattttctttctcaaaagcatggattgatgtttgtaaagactaggaataaaaaacatccagacatcgtctggatgtttacttatttcacaaacccaagcagcatttcacggatgattttgctggctgtgtttgccgtttgctctgagtggtcatacaccggtgcgacttccactaaatcagcgccctttacgtttacctctgaacgcgcaatttcatggaccgatgcaagcagttctttagacgtgatgccgccggcgtcaaccgttcctgtacccggtgcgtgtgcagggtctaatacgtcaatgtcaattgtgacataaaccggacggcccgccagcttcggaagcacctctttcagcggttcaagcacctcaaattttgagatgtgcatgccgttttccttcgcccattcaaactcttctttcatgccggaacggattccgaatgaatacacattgtgcggtccgatcaattctgccgccttacggatcggcgtggagtgagaaagcggttctccctcataatcaacacgaagatctgtatgtgcgtcaaaatggataatcgcaaggtctgggtatttcttgtacatcgctttaatgacaggccatgacacgaggtgctccccgcccatacccattgggaacttccctttttctaaaatgctgtccacgtactcttcaatcatatccaggcttcgctgcggatttccgaacggcagcggaatgtcgccggcgtcaaagaagttcaagtcagccagatcgcggtctaaatatgggctgtattcctcaaggccgattgacacctcacggattctgcttggaccaaagcgtgagcccgggcgatagctgactgtccagtccatcggcatgccgtaaagaatggcatccgcctcttcccactcgggacggctcgcgataaatacttttcctgaataagcttcatcaaatctcatcgataataccctcgctttcctgtaaaaaagcgcaagattcgctcctgcgccataccttcattatttaatcaggtcactcacaaatttcggcagaacaaatgccgctttatgaatatcttttgtgtaatatttcgtctcaatatcgaagaaacggctgtcttccactgcaagcggatcatattttttcgagccaattgtaaatgtccacaaaccgctcggatatgtcggaatgttcgccgtatacagcttcgtaatcgggaagatttccttcacgtcgcgctgtacatttgtgattaattccggtgtaaaccatgggttgtccgtctgtgcgacaaaaatgccgtcttctttcagcgctttagcgattcctgcgtagaatccttttgtaaacaggtttacagccggtccgactggttcagtcgaatctaccatgattacgtcatattgattttcagattttgcaatgtgcataaatccgtcatctacctgcacgtcaacgcgcggatcatccagtttgcctgcgatagaaggaaggaactttttagagtattcgatcaccttgccgtcaatatctacaagtgtcgcttttttcacgcttgggtgcttcaggatttctctgataacgccgccgtcaccaccgccgactacgagaacgtgctccggatttgggtgcgtgaataatgggacatgcgccaccatttcgtgataaacgaattcgtctttttcagatgtcatcaccatgccgtctaaaaacagcatgttgccgaactcttctgtttccaccatttctaaatgctgaaactccgtttgttctgtatgtaacgttttgttaaccttcatcgtaatgccaaagtttttcgtctgcttctctgtgtaccaaagttcgctcaattgtcatctccctttcgaggctgtattcatttattgtaagcgtcttatcagcttttattctcggttgaaatctcattttcacctaaggaaaaagtatagaggatgccggggaaaaagtaaagatgcgtcctgttctgcgatgtttaaaaacgatctttttttctcataatagtagaaacataaaaaaaggggggaacccgttgtggatgcaatgacaaataaacggctgagactgacgctgaaaaccgttcgcgcctttatctttttaggggcttttgcggccttggcggcagctgccgtgtttatgactgtcattttgatagccaaataccagggcgctccctcggtgcaagtgccgcaatccacgattttgtatgcgagtgacggctcaaagctcggggaaacgaactacggcgaaaagcgctattgggtccccttaaaggacatgaatccgacgatcgtaaaagcgacagtggcgattgaagaccagaatttctacgatcatcacggctttgattataaacgcatggccggcgcggcgcttgctgacctgaaagcatttgccaaggttcagggtgcaagcaccatcacccagcaatatgcgagaaacttataccttgaacacgacaaaacgtggaaacggaaatggaatgaggcgttctacacgatccgtctggaacaaaactattctaaggacgagatattagaaggctatttaaatacgatttactacggacacggcgcctacggcattgaagcagcttcccgcctatatttcggcaagcatgccaaaaacctaaccgatgcggaggcggcgcttttggcaggtatcccgaaaggcccttccggctattcaccgtatgtcaatgagacgaaggccaaggaacgccagaaaacgattgtgcggatgatggaaaagcagcagatgatcagccaaaagaaagcggatgaattgatcaaggaacctctttcctatcagcctttgaataagcaagtttccaagagaaaggctccttatttctacgacaatgcgatgagagagctggagaaaaagctcggcatgacacgggagcaaattgaaacgagcgggttaaacgtctatacaacggtagataaacggatgcagcgcatcgccgaggagaccattaccgaaacggttaacgcgggctctgacattcaagtcgggttttcagccattgatccccgcaccggaaacgttctcgcccttgtcggcggcaggaattatcaaaaaagcccgtttgaccggacgacacaggcgaagcgccagcctgcttcgacgatcaagccgttgctgtactataaagcgattcagagtggatttacgccagtcactttaatgaaaagcgaagaaaccgagtttcaaattgatgcaaagggagaaacctattctccaagcaactataacggatactacgccaacaagccgattacgcttctgcaggcgctggcgctttccgacaatatttacgctgtgaaaacgcatctttttctcggcacgaacaaacttgtaaagacggcaaaggaattcggcattaccgcccatcttcaagcactgccgtctctggcactcggcaccgaacccgtgcgtccgattgagatggtcaacgcctatgccatgctcgcaaatggcggaaagaaaatcgaaccgacttttatttcaagggtaacggacgcagccggccacgtgctgtacgaaaacccgaatcagcataaacaggtgcttgatgaaaaagccgcttttgtcacagcgagtatgatgacaggcatgtttgataccgatttaaatggatatacgtcggttacgggacgaacgatagccaaccgcctgacaagaacgtatgccggaaaatcaggaaccaccagcgcagacagctggatgatcggcttcaatccgaagctggccgcaggtgtttggaccggctatgacaaaaacagcaccatcgactcggtcgaagaaaaaagctatgctaaaaccatttgggcggacttcatggaggacgcgctcaaaggcgaaccggaaaccgcgttcaagccgccaaaaggcgtaaccggtgtgtacattgatccggaaacaggctactcatcaggtcccggctgtgccgctaagcattacacatattttgtgaaagggacagaacccgcaaacgtgtgctacggggcagaacccgcaaaacaaacaaaagaccggcttccatccaaagaaaagcccgcttccgagaaaaagtggtgggacaaatggctggggcgacatcattgaaaataacccggctcctcggaggccgggttattcgtatggttccttcataatcgatggaagaatgttagacaatcgagctgaacaatcagttttgggataaagtggtgaatttctcatttcttcggcgctggctttcatctcccagtcgccgactcatatccccctaaaaatgaaaaaccccgagtcttgtttcggctcgggattttccatgtcctatttctgtatcaccagtttactcaatgtttacgaaaaatatctcaaatactttaaaagttcacagaaaattcataaattaattgttttccggaagcaggcttgtttttaattcatctgatgaacggtcccataggccctgatcatgctttttcagaaattcgcctagtacacgcttcgagctgtcgtccattttatcaacgatgattttccgtttcatggatttatccatcaaattcacatgctcaggcagcgacttgtagcctcttctgatgcttctgtcgaccgtcatttcacaggctgtcacaccagcgtaataaggcccctcttcttttctgtcaatcgttacccacacaagccagtatggttttccgttcggcacttcttctttattcgggagaaatttaattcctttttcaacggtgctgcgggcatgcatggcgccgatgtctacgaacgcttctttttcttctacatcaacgaatacgggagaaatgttatcaaggctgagtgcccctacgccaaaaccgccgtgtccgtctgtcggatcacttttgataatattaaacccgattgattttttctttttttcttccatgaagttctacctcctacaaaagcggttgaaatatcgctgaaaacagctttaaaatcgaatctcttcctgcattgagcatcggccacagcacgtaagatcctagcggtgtcacaaacagcaccaaaaatacgataaagccgtagctctccgcctgcgtcattttggtacgcatgcccggcggaacgagatcttctataattcgatagccatcgagcggaggaagcggcagcagattaaataaaaacaagacaagattcagctgtatccaaatggaaaaaaactgatccagccccgtgctgaacgccgcaagcatttccattccgtacgcatgcatcaacactaacaaaaagaaaccgataaacgcaagaatcaggttactgacgggcccggctatagatacgagcacaccggcaagccggggtttcttaaagaagcggcgattcacgggaatggggcgcgcccacccgaagccggccaccaaaatcaaaatggttccgaacggatcaaggtgtttaatgggattcagcgtcagtcttccttgttttttcgccgtatcgtcaccgaatttgtatgcgacataagcgtgggcaagctcgtgcatcgtaaacgacacaattagcgtgatgacgaggtatggcattaaagataacggataatataaaaaacggtccaagtgagatatccctctttctcaaaatgcaagaatttactttattcagtatactataagaagcctctttttctaaagagaggaaacgagataaaggaggattcagcacccatgccatacgtaactgtcaaaatgctcgaaggccgtacagacgagcaaaaacgcaatcttgtcgagaaagtaacagaagccgtaaaggaaacaaccggtgcttctgaagaaaaaattgttgtctttatagaagaaatgagaaaagaccattatgccgtcgcaggcaaacgcctgagcgatatggaataatctctataaagccggcgcttcgcgcaccggcttttattatccctattgagccagcttcgcaataatcgccaagaacgtctttttctcttcggctgttaaacgttcaaacatgccatcaatcagctgctggcggttttcgatcatttgttcagccgctccccggcccgcttcagaaagcgtaatccatacagtgcggcggtcattgttatttctcgatctctcaataaacccttcctgctctaaatgattcagagctgtggtcgtggcagagggagacagtgtgacctccttcaaaatatcctttatggtgcagctcccatgtctgtatatgatccgcagaataaatcctcttacattattcacgtgtttcggaacggtggcttcatctaattgcttcgtgcttttcaaatattttgtaagtgcgtgatccagcaaatttgcttccagtttgtcatggtccatgtcaatttccccatttcgagatgcattcataacatacgaacgatatgatttacttattattttactgattccgaatagggaaagtcaaaaaagcaaaatgtgaattcacagcttttatcctacatgcctcgattttccacctgtttgacaagcttatctttaaatgtctgaaaaggaacatgttcattctgctgatgtccgaatcggcggacgtttaccgcattctcctgctcctcatgatctccaagcaccagcacgtacgggattttctgcacctgcgattctctgattttatagccgagcttctcattgcgctcatcaatgccggctcttatccctgcctgcttcagctccgcctgcacctttctgcaatagtctaagtgaacgtgcgaaaccggtatgatttgaacctggagcggtgcgagccagactgggaaagccccgccgtaatgctcgatcaaaataccgaagaaacggtcgatcgagccgaaaaccgctctgtggatgacaacgggacgaaccttttcattgtgttcgttgatatatgttaaatcaaatttttccggcatttgaaaatcaagctgaattgtcgcacattggtggctccgtttcagggcatcttttatgtggaaatcaattttcggcccgtaaaacgccccatcaccttcattgatctcataagagaggccaagctcctcaaggacgcgtgctaaggcacgttccgacgcttcccaaaggctgtcatcgcctaatgaatcctccgggcgagtcgaaagctcaactgaatactcgaaaccaaatgtccgatatacctcatcaatcagccgaatcgcttctttgatctcactctcaatctgatcctcccgaacgaaaatatgggcgtcatcctgacagaacgtccgaacgcgaagcattccgtttaaagcgccgctgtattcatggcgatgcacctgtccgaattccgccatgcgaatcggcagatcccgataagaatacaggctgtttttaaagatgagcatgtggccggggcaattcatcggcttcattgcgaatcttgtatcatccacttctgaaaagtacatattgtcgcgataatggtcccaatggcctgactgctcccataaccgctgattcatcataaacggcgtacgcacctcatcgtagccggcatttgtttgcagctcacgcgagaagcgctccagctcattgcggacaatctgccctttcggcaaataaaacggcatccccggcgcttcttcagaaaacataaacagccctaactgtttgccgagcttgcgatggtctcgttttgccgcttcttccagcatatgcaggtgcgcatccaaatcttttttcttttgaaacgcaaccccgtacacccgctgcaggacttcatttttactgtctccgcgccaataagcgcctgatactcttgtcagtttgaacgccttgatcatccctgtagaaggaagatgcggcccgcggcacaggtcaacgaattccccttgctggtacagtgtgatatcctccccgcgcggaatatcctttaaaatctcaagcttgagccgctcgtctttttgtgcaaacagctcttcagcttcttcgtaagaaacctctatacgtttgatttcaaggttctcatttattatgtttttcatttctttttcgatggcccctaagtctcctgatgccaagcttttccccagcttcatgtcatagtagaagccgtctagaatcacaggccctacccccaatgacacttcgccgtacagccgttttactgcttgggccagcacgtgcgctgttgtgtggcgaagcacctgcaagccttcttgtgaatcgagtgtgacaatcgaaagctcagcatcctcctccagcttgaaactgagatcaacaagcttgccgttgacctgacctgcggccgccttcttttgcagactggaactgatagaaccagccgcttctttgattgtgatgcctttcggatattcctggatctgtccgtccggaagctgaatgtgtacatttttactcattttaaaacactccttattcattgttgtatataaaaaaacacacccgtcccgcagatagggacgagtgtgtgattaacccgtggttccacccaagttcccgacaaatactatattgtcggctcggtgctgtaacgcagcatagacggcattggatacttcagttccccaatgctgctccaaggcggtaaatgatattcctaagctgggaagctctcacctttccttccctctctgaaaaccgtaactatcattcgtgtccttttcaacgcatttatgtagttcatataaaaaaacacacccatccctctaaaagggacgaatgtgttgatcatccgtggttccacccaaattcccgatcaattacacatggtgatcggcttaaagatgctgtaacgcagcatgacggtatcagatacttgttttccccgatacggctcaaaggcggtaagctgctttccctgcgttaggaagatctcagctgtccttccctctctggaaaccgtaaaaagcatctcgtgtccttatcagtgcctgttgtttcaataattttttacatcttactatatattcccacaaagtgcaatcagtgatttacattttttctgacgcggcagtcccgttatgggcagccagaaacagccatacaagcaatgcagcgaggctgtatgcagcccccatcatcaaaaatgtaaacccggcaccggcataccaagtggcggacagatgaatgatcaccccggttatcgctacgccgaccaaggctccgatttgccggtttgcatttaacgccgcaccggcgatattcgcatgtctttgcccggcagcctgcatgatcacagttgtcatggcaggaactgtaataccggtacagaggttcataacagacatcaacaccgccagctgccaataaggaaaatccggagaaatcagcacaaacaacagcaatgcaatgatacagctgaccgccattgatacaaacataagctgcccggcttcaaatcgattcgccagacgggcaaacagcagattgccgaacacgaagaccgccatcatcggcagcagctccactccagccataaaggaacttgcccctcctgcttcctgcaaaaaaaggctgagcataaacatgccgccaaaaagggcgaaattcagcaaaaacccgataaattgggcagctgagaagcggccgtttttgtataaggacgccggcaggatgggtgcttttgcagaaatttcccgcagcaaaaacagcacaaatgccaaaatcgctgcagtaaatactacaagaatcactggcgagcgccagcccgctgaaggcccctgtatcaaagcataggaaagaaacccgagagccatcatgccaagcagatgcccgatgatgttcacgcggctgctttttcccggaacgcggctgaggattcggtaagctgaaatgagcgcagcagcccctattggcacattgatcagaaaaatactctgccagcccgccaactctaccagcacgcccccgataaaaggcccaagggctgaagcggcagaaacaagcgcggcccacagcccaaacattctcgcccgcgcccgctcatcagggtaagaggcagccaaaaggctgagtgagcttggcataaacaaagctgcgccaattccctgtataaggcgtccggcaatcagcatctgtccatttatagatgcagcgcataaacaggaggccagaacaaaaacggctagacccaagatatagatcgtcttcgagccgaaacggtcagccaaggctccgcccgccagcagaagcgacgcaaaagtaagaatgtacccgtccacaacccacgttacacctgaaagtgacattgaaagagtgtttttcatatcagccatcgccacattcacaacggtcacatcaagagttgccatgaggaaaccaagtgcgagcacgatcagcacggatatgcctgttgatgatgttgattcttgtatagacccactatttttcattacaattgccctttcacttgcttgattacccaatcatctattttttcaagatcatacaattccccgactctgtccatgacatgctgcaaggattcttctctcataagattggaccatttatcctcgatttcccccatgactgtctccagcacacagtgactttcaccctcaaatacagattgcagcaggcctttcccctgatacatcgaacctctgccttcgaccgcttgataaacatcataaagcgtaatgtcagccaaaggcttcgtcagggtaaaaccgcccttcgtccctggcaaggattctgccaaaccggcttgaactaatgttctcatcagcttcttcaagtaagacggagacacgcgcaatcgctggcttatagcctctgacgtcaaagaagcctgtacaggcagccttgacagtaacagcagcacagaaaccgcctgctccattcctgatttcattttcatcctattcactcccgattcattatggataactattatccataatgaatctcttagcagcttttgtcaataaaaaaagcaaaagaaacgattcatttcttttgcttagtatggttaacaaatctgcttcagttcctctatgtattgaagcgcttcgtcatattcttcatttgtatatttttgcttgcttttgatggtaaagactttttctttcttttcctcatcctcaagcccgtcaaagtaaaggatcgtggaaaccagctctaaaaaccgtgatgaacggctgtttacactgtcgatatagcctttcatatccggcatgtccagatcagcatggtctaaaaatgcggagcctgtctcagtcagcgaataccggtattgaaagtagccgccctttttttccttcacctcatgcagaaatccaaggttgcacagctcttcaatctggagcgtcagttcctccgaatacggtccataaaagtgaaaatcatatttctcatagaaaggaaactgcattttcttggcgatataaatcattttctgcagcttctttcgcccgatgatttctccagaatccgagaacaccttcatcagttttgcatgttctttcaacaaattcccgacatctcctttttccttctttccaatttctatgtcagtcccagcagctgccggattttcattttcgcttccggatgttcagagccgtcacaaatcaagtcctttggatagtacagcttgtggtccgtccgccgtttacctgagatggattccacaatagccgactgcctggacagctctttaatttggccgttttgcgtcaagagatggatcggcagacgctcctcttcctctcccggtcggtaaaaatcgtatggcagatctgatgaagaatcaacgaccaaataatagctcggatcgattcccgcctctttgaacaatgaagtcagctcaaaataagccgacatttcttcattcggattgaattcaacgtattggaacagctggcggttaatgaatctgcggcacaagtcggataaaatcgcgtcttcttcatcctcccaggcctggaagtaatacaaaataatagattcatccagctttacataatcctccagtgtcaatttcccttcaaaaatagaatagaaatgaaccggagcgtgagtgaagacatagccttcatcgtgcagctgcttcgccctgtgaagaatcttcgttaaaatgacctctgcacttctggtcacaggatggaagtagacctgccagtacatttggtaacggctcatgatatagtcttcgacagcgtgcattccgctttctttaatgacgatctgatcctcgcgcggccgcatcacccgaagaatccgctccatatcaaaatggccgtagctgacgcccgtataatatgcgtcgcgctgcaggtaatccatgcggtctgcgtcaatctgactcgaaatcaggctgaccacttgcttgtttttatatgttttggcaatgacttcagcaacatcctgagggaaacccgggctcacctttctgagcacctgattaacctccgtgtctcccaaaatgatacctcttgtaaaatcctcgtggtcaaggtgaaagaccttttcaaatgaatgcgagaacggcccgtgcccgaggtcatgaagcagcgccgcggccaaacagagttcgcgctcactgtcatcccattcagggcggcctttaaagacgtcatcaaccattcttctgacaatttcatagacaccgagagaatggttgaaccggctgtgctcagccccatggaacgtcaaataggtcgttccgagctgcttaattctgcggagacgctgaaattcacgggttccgatcaaatcccatatcagcttgtcccgaacatgaacatagcggtgcaccggatctttaaacactttttcttctgataattttccatttggatacgccatcgtcattccctcttttttttagccgtgtttctattatatcgactctattctttgaaaacatccttgaatttgcccggcgatttgttccatcttcatgaaaaacacatcttgtgaagcaaaaaagcctgacctgagggccgaggctaagaaaaaatatgtttttacttttttattttcttttttactttgtcaatcagctcatcctctgtcggagctgacagcgggcgattgttcacaaaagcaaatgattttttccgtccgggcccgcaataagattggcatcctacctcaacctttgcgtccgggtccacttctttcaaacgcggcagcaatgttttgatattagtggcttggcaatcatcacacactcgaaattcattagccatgacgtacgcttcccttcatttctatgttcatctatgtgaataacctaaaatcacgtttcaaaaaaaatcacatcactcttcattttacaaggattcgactgttcctgcaagccgctccatccttcgtatctcctattctttcagccaatttgtataaatattttccaacctggacattctaataccatgaaaagaaaaatgggagttgagataaatgacaaaacagcgacaagacgcttggtcagaggaaaacgatctgcttttagccgaaacagtgcttcggcatgtgagggagggcagcactcagctgaacgcctttgaagaagtcggcgataaattaaaccggacatccgcagcctgcggattcagatggaacgcagtggtccgccatcaatatgaaaaagcgcttcagcttgcgaagaaacaacgaaaacagcggatgagagcgctcggaaacgggcagcccgcgaaaaaaagattattatatcagcctcctgccgttgatcctgaaatcattcaagaaaccgctgcagaagagccggttaaaacggaaacaccttctgtcgaaaatgagcaacctttaatgtctggcgaacatatgccttttgttgatgaaagctttaaggaagagttagctagtctatcacacttattgtctcctcaaacgcctgcagctgcgcctgagatgacgatgaatgatgtgatccgcttcctgcagaattacaaaggcaataacgagcaatcatcagcattaaaaatggaaaacgagcgtttaaagaaagaaaatcaggaattgcaaaacaaaacagagcagctagaggcagaagttcaaaagcttgaaaaagaccaaaaaacgatccaagaagattatgaaaccttggtgaaaattatgaacagagccagaaagctagttttatttgaagaagatgaacatgcctctccgtccttcaaaatggaccggaacggcaatttagaaaaattagcggaatgacatagaaaaatcccaaaacgggcagctgttttgggattttcgccatgtgcaaaatccccttttctattgagaaaagagaatttcctcattttgcagccggatcagctattcttgtaaaatgaggccaagcttatgtgaatctattaagacatgtgagctgcctcggccgttttttgtttccgaggcgcagcagaaatgaccaaaagccccagcatcataagcgcaatgcccagccacgaggaaggcgaaagcatttcccctatgaaaaacacgccaagcaatgaagccgtcagcggttcagctaaagacagcgtgaccgccgccgaggccggaaccccggtaagccctttcgcaaacaaaaagtatgcggcacatgttgcaattaacccgatgtaaaggcttgttcccagtcctctaggggtcaatatccacgagatatctaactgccataatagcggcgtcagcaagatggcgctgatcatgaatacaacggcggaggtcgctcgcggaggctgggttttcatcatcgctttactgatgagcgtatagcctgcaaaagaagcacccgctccaagcgccataagaacaccagccacatcaatccgaacattggaactgtcggaaaacagaagccagcaacccgctaaagccagcacagtcgcaatccaccaagagtttcgcgggcgtttcttcaatacagcccattcgagggtcccggcaatgataggcgcactgccgatggcaatcacagttcccactgcaattcccgtttctttaaccgctgtgaaaaacagcggctggtaacacgccatacaaacagcggctaaaaatacgagcggccatgaccaatttttcacgtgaagctcccggctgatccaaaccgcaagcagcatggcgcttcctcctattaataacctgaacgctccaaatgccagcggtgtggcgctttctggagccaacgcctgaacggttcccgtagttccccagaaaaaagccgccatcaatacaaaaaggctgtaaatattccccttcatctgcctctcccctttaatatggatgctgatgtcattttatcgtttttctttttgtcgtggttatctgtatgtaagaaggatttatctgaaaataagattgtggggtaaaatgctgcttgaaataaaaaatgtatgccggcatatacagccggcatgcgaagaacgttcacccaaatacctttgcattccgctcagccatccggacgaggtttttctcaaattccatttcctcatcaatggacagtccagctgaataaagatgggtgcttaacgcttttaattccgtcaataaagcgaacattaagtcttgtacggagatgtctttttgcagaagctcacttaaggacgccatcgtttccggacgtatttccggatagacgccttttttatcgttttgcttgtctttcagcgccgcttgatagaatcgtctgatcaagtcggccctttcactgccgcttttatctgcacagagataaatttgaacagcgactccgccgcgaacgcgtctctgagagatgccggcgaactttttgccatttatactgaggtcatagctgccgggacaataagacccttcaatttcataggcttcgatctttgcgttgtacggtctcagcattcgtctcatcagctcgaccatcgcttcatatcctttgtctatatcgatgcctttcttttcgtcctcgaatatgagagagatatttaaaacaccgtcatccaatacgacggcaagaccgccggaattgcgtacgatcacacggtatccttcgctctccagcaaggagataccatcctgcaaaaacgggaggcgtgtatcctgtattccaaggacaattgtatcgtggtgcacccatgagcgcgctgtcgccggcgacacgccttttccgacggacatgcatagcgtatcatccattgcgaaggattgcttcgcatcaaataaagggccgagactggattggtcaatgactctccatttcggctgcatcagtaaatcaatcggttggtttgccatctatgtaaaaccctttcatgttaggcttattgaacgaaaactattatatcatttcagcagctgtgattgataattgcttttcagcatcgtaataaaaatttctttattttttgtattctccatgagaggagaatgaatgtaagacagcttgcgctttaacgagaaattattaatatgcagaattgaaatttcgcggtggatcaaatccttacgcagcacgcttctggatagaaccgaaagtcccatgccgttaatcaccgcttcctttacaccttgattgctgctgatggtaaacattgatttcggccgaagtccatttgaactgagtacatgatcgagatattctctcgtcccggagcctttctctcttgtcacccacgcttcgttctgcaaatcgctgatcgaaatctctttccgcccggcgagcggatgctgatttggagcggcaatgcacatttcatcctccatgaacggttcaatttccagctcattctcgtttgtatgtccttcaatcagcccgatatcagcctgaagcatacgcacacgctcgctgacctcctctgtattgccaatcatgacatcgaggttcagctctggatacagcttttgcagctgggccaatagcggcggaagaatatactcaccaattgtaaagcttgcagctattttcaattcgcccttcacatagtgatgatgcgcatagatttcagccttggcttgttcgtagagaaacaccatttgctttgctctttgatataaaatgtctcctgtcggcgttgtcgtaaagtgttttggcgacctgttcagaagagccgtttgaaattctttctcaagatttttgatatgcagactgacgctgggctgggagatcatcagcttttctgccgcttttgtgaagtttttttcttctaccaccgctataaacgttttcagcacgtcgtaatacaaaaaccccacccctgtcattaatgaaatatatggttatgattagttttctttattgtactcatatcatccgtcttggtaaagaaggctatacagaagcgcaaaaaaggcagccctcggtcgagagctgccatcgtcttcatttttattacagtgcttgcgccgctgtaattaatgcgagattgtaaacatcttcagcgttacatcctcttgaaaggtcgtttacaggcatatttaaaccttgcaggattggtcctacagcttcaaagttgcccaaacgctgagcgattttatagccgatgtttcctgcttcaaggcttgggaatacgaatacgttagcgtcccctttgatctcggaatccggcgcttttttctcagctacagatggaacaaatgcagcatcgaattggaattcgccgtcaagtgtcagttcaggcgctttttctttcgcgattttcactgcatccgctactttttctgtttcatcagattttgctgagccttttgtagagaagctgagcattgccacgcgaggctcaatgtcgaacatttttgccgtattggcactttcgatcgcaatctcggcaaggtcttggctgtcaggcgcaatgttgatcgcgcaatctgcgaatacgtattgctcttccccgcgagccatgatgaacacgcctgaagtctttttcacgccttcttttgttttgatgatttgaagagccgggcgtacagtgtcagctgtcgagtgagcagctccgcttacaagtccgtctgcaaggcctttatacaccagcattgtaccgaagtagttctcgtctaataacgctttgcgagcctgttcttctgtcgctttgcctttgcggcgttctacaaatgcttgtacaaggtcttccatgccttcatatgtatgaggatcataaatcttaacgccgtccagcgtaaggttcaattcttttgcttttgcttggatctcattttcattgccgatcacaatcggattcagcactttgtttcctgcaagcttgctgaccgcttctaaaatacgctcgtctaagccttcaggaaatacaattttaacgtcttttccagctactttttcttgcactgttgaaaataaatctgccacaataaaacctcctcaaaaagttacaaaaacgctttcttttactagcatactcttcttccaatcaaattcaaacagccaactttcattatagcgctttcataaaaaaatcttatttttctaactaatttaagtgactcaatcttcccttataggttcttctattttgatggagttatacggaagggatgttcaaggtttctccacagtagaatcggataaactatggtatagtgaaggcaatcatgaaaagataatgggagtgaagataaatgagtgaacagcaaatgacgaatgaagctgcaaaaacgcttgacggctggtatgcgcttcatgatttccgcacaatggattggacttcctggaagctgctgtccagtgatgagcgccaatctatcatacatgaattcaccgggttgcttgaaaaatggggcgtagcccaaaaagaaggaaaaggatcgcaaactctttacagcatcgtcggccaaaaagctgattttatgctgatgatccttcgtcctacaatggaagaattaaatcaaattgagcttgaattcaacaaatcaagacttgctgagttcaccattccggcatactcctacgtatcagtggtagagctgagcaactacttggcaagcggtgacggcgatccttatgaaaatccgcatgtgcgcgctcgcctttaccctgaactgccggaatcaaaatatgtatgcttctatccaatggataaaagaagatccggcaatgacaactggtatatgctttcaatggaagaacgcagaaacttgatgagaagccacggtttaatcggccgcagctatgcgggcaaagtcaaacagatcatcaccggctctgtcggctttgacgattacgagtggggcgttacattatttagcgatgatgtccttcaattcaagaagctagtgtacgaaatgcgttttgacgaagtcagcgctcgctatggcgaatttggttcattctttgtcggcaatcacctttcgcttgatacacttcctcaattcctatatgtataatatcccctcccgccctatccggcgggagtttttcaatcctcctttatcagaatttaaataaaatttgctattttcttcgttttttcttacgatgtagataataatccaattttttcaaaggggtgcagttatttgtcaaaacgaaccgcatttgttatgggagccagtcaagggatcgggaaagcaatcgctctgaaattagcagaccagcatttttccctcgtcattaattcgcgaaatttggataatattgaatctgtcaaagaagacattttggccaagcatcctgaggcgagcgtcattgtccttgcgggcgatatgtctgaccagcatacgagagcgggcatttttcaggaaatcgaatctcaatgcggacggcttgatgttctgattaataatatcccgggcggcgcgcctgatacatttgataactgcaatatagacgatatgacggccacgttcactcaaaagaccgttgcctatattgacgctatcaagcgtgcttcctcactgatgaaacaaaacgagtttggcagaatcatcaacattgtcggaaatctatggaaagaacccggcgccaacatgttcacaaacagtatgatgaatgccgctttaattaacgccagtaaaaatatttccatccagcttgctcctcacaacattactgtcaactgtctgaatcctggttttatcgctacagaccgttatcatcaatttgtggaaaatgtgatgaaaaagaacagcatatccaaacagaaagcagaggaacagattgcttccgggattccgatgaaacgggtcggatcagccgaagaaaccgcagcgctcgccgcgtttcttgcctctgaggaagcctcctacatcacgggacagcaaatttccgctgatggcggcagcatgaaaagcatataaaaacatcccgctttttagcgggatgtttcttgtaatgacccgaacggcaggttcagcttttgaatccgcgtgacaaattcccgcagatcctcctgcttcgacaccattgagattctgacatgcctttttccgttgcttccaaaaatttcgcccggtgtgactacgacatgggcatgctccagcaagtaatcggaaaattggtgagatgtctcaaacgtattcggaatttcagcccatacgtaaaaggttccttttggcttttccatcttccagcccaattccttttcgcaaagcgccgtaaaaaagtcaattcgttccttataaattcgtttcaacgattccgtatgctccggatctccagaaagcgccgcactcgctgcctgctgcagcccgccgaacatgccgacaaatacatgatcctgaaattcattgacggcctgaatgatcttttcgttcccaaccgcaaacgccattctccagccggccatgttaaatgtttttgaaaatgaataaagctctgctccgacaattttggcatcctctgcctcaagaaaactggccggtttttgatcgaattcaaacgctccgtatgcaaaatcatgaatcaaatggatgttatgctctttcgcaaaagcagcagctcttgcataaaaagccgcatcagccacagctccagtggggttgttcgggtagtttaaaaacataagcttcgctttttccagcacggctggatcaatcttttcaaaatccggcagatagccattttcttcatacagcggcatttcgtaaagctcagctcgcgccatcgtaatccctgataaatattcaggatagcctggattcgggactaaagcgatgtctcccggattgagcaggcattgtgtcagcacatacaatccggctttcccgcctccgaaaagcgcgacttccgtttcaggattgattgtcactccgtattcccttttatagaaagcagcgatcgcttcctttaaaaaaggatagcccctgaaagggccgtatccatgaaacgaaggattcagagaagcctcccgcaaagcctccacaatatgcggcggagtgggaaggtcagggttcccctgtccgagattaatgatatgggcccccgttttttccaattcctttaccttttgaaaaacgagagaaaactcctgccttggaagtgtcttgatgacatcggacggtgttatttccatctaaaagactcctttttgctccgttttgttatcccgttccaaaaacgatttgttgacgagcttcgtatgcagaaacaaaccgcatacgatcacgacaatcagccccataatgaccggagcgcttaggatgttaatgaacattgaaccaatagaaatgcataatccgatagacgcttcggccactgaaaaaatgcgcccttgaatctggtttgccgcattttcctgaaccttcacttttgcaagcacttccccgtattccatcgcgatgaaaaagaggatcgccgcgatgacagaaacagcgaaaatcggcgtgaataaaaacagcgccagtgagacaatggataaaacggtaaagtacgtcaggcctctattgttgttaaagccccatttgctgacaagcaccgctccgataaagccgccgaagccgatgcagaacgtgagaataaagttgccgatttccccgtcacccagaaagcggctgacaatcggaaaatagctgtacacaactccccacagcaaagccattgtaatcatcgtaaacatggcgtttaatacgaatgcattggttttgatttccttgagtccttccttaaaagactgaaaggcctctttaatgttttcagattgaatcggcacaaattgcagcttgatacggctgataaaaaatgccgaaaccaggtatgtcaaaccgttaaaggcaacagccagctctacagatccacctaacagaaagagccctccggcagccgccccgacgataatggagatggttgtcgcttttgcaaataacgtgttgatgcttttaatatctgattccaaggacgacatgacagcgagacgggcgggattaaaaaacacgccgcttccataagaaataaacagcagggccagaaaaatcagcggatactcgccttttggaagaaatgtgagccccaaaaagatgatgcctctgatgatatccgtccacagcatgatcttaattctgtctaaccggtcgaccagaacccccaaaaacggctgaaacaccatcggaatgcttctgaccacgatgaccccggacgtcacccaataatcgtgataatatgtagacaaaatgagcagggcagggagaacacaatagtctcccatgaacgatagcgcctgcccgtaaagcaagtatttagagttgggtttcagctgtttcatactggcagcacatactttgccgtcagctttgcatgctgctgaatttgtctgattgattcagccacatcctgtgaattactgcctttcagttcaaatgcagcaatggaattgaaagcttcaaacaatgtcaaatcaattgaagtgcctggtgctgcggccgaaaaagaaacgatttcagtatccccttttaaaagcccgtccggaatatcgatcgcttcaatgaccaaatcctcagcggtttctggaatctggccattttgtttgaaatgctgcgggtacaaatggcagtcggcgacatagtaaggctcttgatccaataatccgtccggcagatcggcatcttttccgaaacagaggacatctaataataattgcgccatatcaaggccgaaaacctttttaatgttagggatcatattccagccggcaaatctggctgccgattcaattaaacccggttctctgtttttcattagcttgacctctgtatgtgttgcgcaattttgcaggccaagcccttcatttgcctttttggcagcttcgacaattttcttttttgcctcttcatccagaatggacggcgtaatgtgggatgtctctgtaaacccgatttgcggcgttttatcatgaatggcgatcgggaaatactcaccgtcagccatgatgccttctatactgatatagtcggagtacccttctgtttgataccagtctccgtactcaccctgtaaaaattcttcagcgataaacggcgcttcaaacgtaaccgcctttggcacgttaattgatttcagatagtcattgactctgttaaattcatcttctgccgtctcagtgtccgtaatcagcgttacaccgatagaactcgctaagtatgtaggctttaagataagaggtgtgccgatctcttcaagagcagcacggaaatcttcaagagttgtgactcgtttgtttttgatcgatttgactccggccttattaaaagcgtccctcattttatttttatctctggcattttcggctgcctgcacgccggcacctctcaagcccagacgttcacaggctttcgccatcggagcaatgaataattcattgtttgttgtgatggcatccgccccaaacatttcggcaaccttgacgatttgctcgacgacctcttcctcaggcttgttatgatcctcatgcgcccaataaatggagtcaggatgctcaaaatcagctaaactcttaaaatagtctttatcttttacgaccgcgaccgagtatttttcaatcaatgctgcatgggaggctgtaattgcaaaaggtcttggaataaagctgaccaggttatatttttcagcagcgcttttataaaacatgtgcggcgggcagcctccaagatcagcgatgaccaatactgtttttctctccatatgtaaaacactccttctctattgtgcggtgtatcctccgtctgcggtgatggcgcttccggtcatatagcttgataaatccgaggctaaaaacagcatcacgtttgcgatttcttcaggtttcccaagcctcagcagcggatttaccttcgccttttcttttttgatctcttcaagtgtgccttcattattttcaaggaatgatttttcattcagcggtgtgtcgatgatccccgggcatacgcagttcacgcgaatgtgatgcttcgcataatcaacggccattgatttagtcagctgcaaaaccccgcctttgctggcgttataagcaggaatatcaggccatgccacgagtccgccgacagagcacgtattaatgatgttgcccttgccggcggccagcatatgcttgagtgcatgtttgctcattaaaaacatgccggtcaaattgacttgcagcaccttgttccaatcgctgagctccatctcgtgaataggcgccacgatttcgatgcctgcattattaatcaagacatcgagcccgccaaatgtatgaaccgccgattcaactgcgtgctggcaggcagcttcgtctgtgatgtccgtttgcacaaagtgcagcctgtcattattttcttttcgtaccattgcttctccctgcgcttcatcaatatccgccacaaccacattggcctgctggcccaaaaaagcctgaaccgcagcataaccaatgcctgatgcgcctccagttataaggacggttttatcggtgaggttcatgatcattcatccgccttcattttttttgcttttgctctgttgtagcgcggcgggaagaagatattaatcgattttgattctttttccgaacggttgatggcaccgtgatcttcacgaggctcacagaaataggctgtgccgaatttcatctcgactgtgcagccttcgaccgtcatgtcatagccgccgccgatgcagatgcctatttgttcattccgatgtttatggaaaggcatttctccgccatttccagggattttggcaagcataatttctacccaatcctcaacaaagaacgtgacttccatgcccggcagcaggtctcttgttttgaaaatatccaaaaagtagtcctcaggacttgtatatgtttcatcagctttcagccgcttgatatcaatagcaatcacttcttggtctgtgtcgtttcttgccccatgtggcacatgcggcggcgcgatataggcagattccaaggctgtcatttttcttgtcacatctccgacagtcatcatcagctcgccagaaacgaccatgccgatttggacctccttatgctgatggggttcaacattggtatgcggcgggacgtaagacattaatacttcagtatcccctcgtacggttgaatactgcctcactccgttttcccattcaattaatttcggtgtcgggaaataaagctcctgcatatcttctttagttttcatcatcaacgtctccttttccaaataatgaccagctcattggaatgcttttgaatgtttttacaaaggttagcccgtacttttgccgtgcaagctcattggttaaggcaatgtcatacaaaccttcttttacttttcttgcggcttgactggttgaattgactagtttgaaacgaacatctttgcgggtaaaatattttattaaattaataggtgaaggatgtgaaacaataacagatgtatcaagcatatcgtctctgaattcaaaatcaggacgaacagccaggccgtacatcggtgtatcgcacctgaagatctgcaatagctgcaaatccggcctcatgtagaaatgcttaatgccatcgtaagcatgtgggacgatggtatattccagcgggctttggagcgtcctttcgatgcatgattcaaaagtatcatgcaaggacaatttactgttcagcccttgtagaagagtaaaattggaaatgaaatgctttgctgcgtactcactgcttgtcccctcagggccgagcgtgttgactgtaatgagtttggatagtgaatcagttcttttttttgtctgaatgctattatccaatataatcatgagcaccaaccaatcttttaaaattttaagtaaattttatccagcggcaattgaactgtcaatgttttttgaaaatattgataattattcccatacaaacaaaaaaaccctttaaaaagggtttttaattataggaatttagaaactttgtttattgagataaggactgatcggccttctgctcaagcttgccgtactttttatatgcgaatatactgagcacaaatccgaggactgtgatggcggcgcaaatcaatccgacagctgcatagccgtatgccacatatacgggtcccattaaagcagaacctaatgtcacggccagattcgaggcgaggctgtaaaacaccatgacttttccgcgatgacgttctgagcagtcactcaaaatggtgctgagcagcgtcaccgtcaaactttgcattaatccccaaataaataggctgacgattaacagaaacattgacgccggcgcatatggtaaacacgccagcagaacgctgatgacccccagcgcaatcaaaagggagcgcatttttccgatgcggtcggctatctttcctgtaatcacactcatggaaaacccgattccataaatcatgataaataagcccgcagccgtgtttcctccggtaaaaacgtcctgaagataggtgcctaaaaaggaatacataccgtaaaaaccaatcatattacagaaggttatcgtgatataaacaggtacacgagggactttcagcgcatcccggaatgttcctgccggctcttctatttcttccttgccgctgtttttatgttgggcatggcggcgcatttcaaggagaatcagcaggacaactaaaacacccatcagggcgaaaatccaaaacgtccatctccaatgcaggacgccgccgataaatgatccgagcggcactccgaaaatcagcgccagcgaccagcttgaaacgatcagccccatcaccttgccccggtatgtataaggaacacgatcaccgacaactgcgtaagcggtcggaacaaacgctcccgcagccaatcccgaaagcgcccggcctaaaaagaagaaaaaaatattttgagccaaagcgcatatcaccgttcctatgataaagatcataagcccggctaataagctcagttctctggagtatttatcgcctaatggaaccaaaagcggcgcaccgataaaaatcataacgccgtaaatactgatagataatgcaaggacgctgacatctgagctgaaggcttttgctaaatccggcagcagcggtgagattacaagctcttcagatccggccgcaaatacccccatcgttaaagccagtgccaacaataacggaaaatgatgttttgttttgatgtcattgttttgattgctgttcattctttctcaaacacctcttccataatcttcttatcataaagttgtattatagtttagcattgttttttcactatttacaattcgaacgaaatatttataagttttattattttcatttaaatcccattatatatttctatatttcattctaaaaatacatgaggatgtaatgcgtaaaaaaagctctccggcctcccggagagctttttctattgtgcctctgtctgctttttttcaatcgtttcatgatttatacgctttttgatgcttagatgatagtatgcataacagaaaataatgatcggcacaccgcagtataagccaattctttgatccggaatgaaaataaggctgatcaacacgcagccatataaacaaaatccgagaatcgggactagcggataaagcggcgttctgaactccagatcattcacatttccgccttctgcaaggaaacgtctgcgaaagaaaaattgcgacgcacaaatggacatccacgcgacaactgtcaccatgcccgagattgagatacaccataaatacactgtttctgcggccatgacacttgtcagcagcgaacagcctgaaatgcctagcgtaatcagcagggcattcatcggcacgcctttttttgtcagtctggtgagaaaggatggacccatttgatttgatgaaagtgaccacatcatacgcgacgccgcatacaaccccgaattagcaacagataaaatggctgttaagatgacaaagttcatgatatctgccgaaaatgggatgccgatttgatcgagtaccgctacaaatgggctttcaatcacccccgccgttttgtacggaaggatggcaaccaagacgaacatagcgagcacaaagaaaaacagcgtgcgccaaatgacatttcgaatggactttggcagtgttttttccgggctttcactttcccctgccgcaatgccgacaagctccgttccctggaacgagaagttcaccatgaccagcgtaaacataacggccagcaccccattagggaaaagtcctctatcagtcataaagttagacaaaaagggtgtctcctgtccgcctttaaagtcaatcaagccaaacacagcggctccgccaatcacaataaataatatgatcgccgccactttgatgcttgaaaaccaaaattccatttctgcaaagcttctgacagagagcgcattaatcaaaaagatgacgatgccgaacacgaggcaccatatccagatcggaacggagggcagccacctttgcatcaaaatgcctgctgacgtcagctctaaccccactgtattcgcccagctgaaccaatacagccagccaatcataaagcctgtcgacggtcccagaaatttagtggcgtaggcctgaaacgatccggccaccggcatggcaacagccaattctcctaaacaaagcatgacgagatacattaaaaatccgccgatgatataagcggcaatggcgccgagcggtcccgcctggctaatggtaaagccagagcctagaaacagcccagtgccaatcacccctcccaaagcaatcataaacaaatgcctgcttttcatgctgcgctgcaattcatttttatgattctgcatcatccttccccctttggttcttttgccgtgatggtcatccggtagctttgcaaaagatgaacggtggtttgctgtatgaggagaggcaatacatgaaatgtgtacggtttatagactcgttctgtccatttatggccgtcttttccgtacacgcccatattaatggatggaatattcagcttgcgtatgtctttgaacggaatggtcccaatcatattccacccagggaagttcctgataaaagaatcaatttcgccatcggtttcgtgcagtgataaaaaactgccgtctgccaagtaggggaaaaactttttgaagacaaatgtttcgcctgtcgattcagcggttttgtcagccgcttcttttatcacatgctgcaaaagctgatctcttgcgctatcttctttcaaatagttatgcggcaggtaaggaggtgcgtaaaatagaatgacttttgcgccttgatcggggtcaagcttttgaagctcttcgattgcctgaaagcatctcatgcgaagttcaaggtgctcgttggctttgaatgtctgctcgatacactgctcgggatctatcccccggtttctcagcttttctaagtattgctccaggctatacacttgaatgtcccatgataaatgtttctttggcaggttggctctttttgcatattcttcataataatctgataatttttgttctgtctctcggcatgcttcctcagtgacttcaataagcaaatccatcatttcttttgctgttctttcataaataaaacaattgaagtacaagctggtgctgacagccgtttgcacattataggattccttgttatcacgctgatacaaacaggatgggggcagaaccaactccccttcaaccttttctgccagatggatgttattgtggagacggcttgtgatttcagatgaaatgaaatttgggtcaattcctgccagtgtatcgccaacatggacttcacgcccgtaaatgtaaaagcaaggcaacagttttcccgcggctccggtatagatatatcttgtctgatcaccatcgtaaagcggggtaataaaatccgtattaatagcagccaaatagtgaagctgtttttctttttttagccggttcagctctgaaatgctggcaagaatgcccgaatgctggctctcctcatcgggattggccataaacaatacatttcccggcaacgtctcaaggttctccgaaaaatgcaggagattggctaaatgcacggcgatgccgctttgcatatcaacagatcctcttccgaacatccaatcgcctgatttggcatcccgctgaacatcctgatcgaactcatagcggctgaaatactcggccaatttctcacaatcaaaagcgatatcctttaaagggccgaaatcttcaattccaactgtatccagatgggcatggtaaatgactgtatttcggctttctccatgtcctttaataaacgcaaaaatatttttgcgattgtatgggtcattgggaatggcctgttcccacacatgactggggttttcctgaaaataaggatagctcgtgatcacttctttgatgaaatctgcttttgtcccttctccaacggtgccgttcacgctgctgaggctgaccagagatgctgtcagcgcctccactctttcagccggattcatgtgactgatttttgtatactgcataaattgtcctcctgattaaaaagttgaaatcgtgcgatccgctaaagaatcgcacgattttatttctctcaaatcaaaaagcttcggacgttgttttggcttgcatatgaagaattaagtaatcgggaccgcctgcttttgagtctgttccggacatattaaaaccgccgaacggctgatagccgacaattgctccggtacatcctctgttaaaatataggtttccgacatggaaatcctcacgcgcccgttcaatgtgcgcacggtttttcgtcagaagcgcacctgttaatccgtattccgtgttattggcaatctccagcatatgatcgaaatcacgcgctttgcaaatcgcaacaaccgggccgaaaatttcttcctgcatcaagcgggcgttttcatcaacatctgcaaagatcgtcggctgaataaagtagccttttgaatcatcgccttctccgccggccaatagcttgccttcagatttgccgatttcaatgtatttcatcactttgttgtaggatgcttcatgaatcacgggacccatatacgtatcaggatcttctggattgccgacagtcagcgttttggtcagcgccacagctttttccaccacttcatcataaacatcctgatgaatgaccgcgcgggagccagcagaacacttttgtcctgaatatccaaatgctgagtacacgatagaggatgcagcaaggtcaagatcagcgtccttgtcgacaagcactgtgtcttttccgcccatttctgcaattacccgtttgagccatttttggcccggctgcactttggcggctcgctcataaatccggcagccgactgcacgggaacctgtaaatgagacaaaccgtgttttcggatgctcaactaagaaatcaccgatctccgctccatctcccggaatgtaattcagaacgccgtttggcagacccgcttcctccatgacctcgacaaattttgctgccactaccggggctgcgtcagccggttttaagagaatcgtatttcctgtcacaatcgctgccgccgctgttcccgccataatcgcaagcgggaagttaaatggagaaatgacgatgccgacgccaagcgcttcgtaatgatattgattgaactcgccagcacggctcttcaccggagccccttccttgagctttaacatttggcgcgcgtagaactctaaaaagtctatcgcttcagccgtgtccgcatccgcttccttccacggttttcccgcttccttcacaagatagcttgaaaattcatgctttcttctgcgcaaaatagccgctgccttaaagagaatattcgcgcggtgctccggtctttgttttttccaggaatcaaatgcctgcaatgcggcttgcatcgctttttcagcaagctcttgatccgctgtagacgcgtacccaatgatctcttctttatttgccgggttaatggaaatgattttgcggtccgtttcaattttttctccatttatgacaagcggataatgcttgccgagctgagtgtttacaaaggccagtgactccccaaatgcagttttattctttgcttccgtaaaatcggtaaatggttcgtgtgcgtatgtgactgtcatatgtagtccccctcgtgttatgaaatatatcttcgcatatgaataaaaatgcaagaatcatgccattttcttgtcttttgctgaaaaaacttgttgaatcgaacagaaatttgtctaacaggtgatcatctttctctatttccgatcttgaacgcaaatttattttgcgatttttgctctttaggcaaaaaacaaatgcaaaattattttgcggaggcttctcaaattagacccatccgcggaatcgcgatgcttctgccgattttctgatgcccgtcatgtaagccgccaaacgcatatccactttatgtgttgccgctgtctgataaattgtttcgaacgagctgaccatgacgcttctcaatttttctgcaacctcttcttccgaccaataatatccttggttgttttgcacccattcaaaataagaaaccgtgacgccgccggcactcgccaggatatccggcacaagcagcacgcctctttcattcaggatcttagtggcatcaatggttgtcggtccgttcgccgcttcaacgacgattgacgcctgaatgttatgtgcgtttttggctgtgatttgattggagatcgcggcaggcactaaaatatcgcaatccttttcaagcagctcctcatttgtgatgacgtcagtaaataaattggtgaccataccgaagctgtcccgtttatcgagcaaataagggatatcaaggccgtctgggttgtagagcccgccattggcatcagaaatcccgatcaccttcgcgcccgcatcgtgcatgaatttggccaggaagctacccgcgtttccaaagccctgtatgatgatgcgcgcgttttgcagcttgatcccttttttcttcaccgcctcttcaatacaaatcgtgacgccctgtgccgtcgccgtttcccgtccttgcgatcctcccaaaacaagcggtttacctgtaataaagcccggagaatcgaattcccgcagccggctatactcatccatcatccacgccataatctgcgaattggtgtatacatctggagctggaatatcctttgtcggaccgacgatctggctgatggcacggacataccccctgctcagcctttccagttctccaaatgacattgtccgcggatcacaaataataccgcccttcccgccgccgtaaggaagattggcaatcccgcatttgagcgtcatccaaatggataatgcctttacttcctcttcattaacttctggatggaagcgaacgcccccctttgtcggaccgacagcatcattgtgctgtgaccggtagcctgtgaacactttgacgctcccattgtccattttgaccggaatgcggacagtgagcattctctgcggctctttcatgagttcatacatatctcccggataacccagcttccgaagggcttccttaatgattgtttgggtagacagaaataagttaagagcttctttttcttcatctttcgagacttgctttgctgacatctttttcacctcattgtttttttggccggctgtaatgtaaacgctttaaaaaatcagcccgccaattcctttctgcattggattcacccttatcatcatgcaagatccgtaccagcttttgaatccacaaaaaaagagactgaaaacatctcagtctctgactacaaatctatcgattaacggggatcaatcaccagctgcgtttcagcataaaaactgccgattcccaaaccgtttactacatcgcctttaatcgtgtaagtgcctgcgcgaggaagagttttacgcaccatgacaaggtcaaattcggatgcgcctaacaaatcaagcgtaagcggaagtctgactgtttttccatcgtttaaaatctgtgtttctttcagtgttcttccattcactgaatctcttgtcgtagcatgaaacccgtcaggaaattgaaattctaccgctccaagagaaagcaccgcatttggtttatatgtcacttcaatatcagaagtggtccactctttcgtgctgttaactgtttttgcctcgattgatgcagactgtgcatgagcttggcccgaaggaagtaagattgatagtaaaacagctgaactgatgaataatgaagatacgaatgaagttctttttagcatgacatttccccctaattgattgttgaaatttggccagagcgtcctctgcagaaaaagcgctttttcataattcgcgaattaccagttctttttcttaaaaattaatctatcatcattttccatggaagtaaatgttttttaaggaatattaacacttggaattcaatgagaattccttcctgtttatacaaggttcaaatggacgattctcctctctttttctagtaaaatctgcctgacattttatatcttttatcctattttaaaaaagggcaaaaaaagtcgaagatgcctctgctcttcgattgatcacgttcctatttttatctgaattcagtgttccagttaaaaccgatcgtctcatcatcccacggaattcttttttcatcaggctgatccgggttatacgacatggtggtaaaatagataattgtcagcggcgtctctcccagcactctatatccgtgagccaccccttttgggattaataacagcatcgggttgtcttcgcccatataatagacgtccgtttctccttttgtctttgaatcctctcgaagatcgtataggacaacctgagcgtggccggttgggaagaaccagagatcatcctgcttctcatgataatgaaatgccttaatcacacccggatagcttttcgaccaagaggcctgcccaaaatgctcaaggaggttctcatcgtcccggaccagctcagcaaaaaagcctctgtcatcgctatgcttcatcaattttttcaccttgactccatcaatcacacgcactgctcctttcctgcaaatactctcgtaacgcttcccgccagtggcgggggcggatgtcggcttcttcaatagcccgatggctcagcacagagtatgccggacggggcgttttgttcccgtattcctctgtcgttacaggcaaaatggctgtttccagcccgctttcttccataattgccgtcgcaaactcataccagctgcatatgcctgaattgctgacatgatagatgcccggcggatggctgaacagtttgatgaccgcttctgctaaatccttcgtataagtcggcgaaccaatttgatcgctgacaacccgaagctcttgtttcgtttcagcaagcttcagcatggtttcaacgaaattactgccgccatgtccgtacacccacgatgttctgatgatcgtgctgtcttttgtcgttaatcgtatcagttcttctccgagccttttgcttttgccataaatggttttcggatcgaggggatcatcttccctatatggctgggttcctttcccattgaatacatagtccgtgctgatatgaacatattgagctccgatgcgggttgactcaagcgctgtataataagcgccgattccgttaatcaagtacgctttatcaagctctttctcgcattgatcaaccgacgtaaacgcggcgctattgaccacgatatccggctgataatggccaaacgaatgccgtactgagcgctggtcagcaatgttcatcatcttctttgttaacgcaatgacctcatatccggcttgcttcagctggcggcatagttccaagccaagctgtcctcccgccccagtcaccaatacctttgtcaatcagatcaccttctcatcggtcattgtctgtataccactgaatcgtacgcgcaatgccttcttcaaacgtcacttcctgccgccagcccagttcatttttcagcttagatgcattgatcgcatagcgccggtcatgcccttttcggtcttccacgtgggcgaacaattcctcacagcccagatgcttcaaaatggcactcgccagctctttattcgtgcgttcatttccgccgccgatgttatacacctcgccgtcggtccctttttctaaaatcagcttgatcgcgcggcaatgatcctccgcaaacagccagtctcggatctggagtccatcgccatacagcggaacaggcaggccctgcttcgcatgacggataatcgtcggaatcattttttcgctgtgctgataaggtccgtaattgttgctgcatcgtgtaatgatggccggaagcttgtgggttttcacataagacaacacgagcaaatcagagcttgctttgctggctgagtatgggttattaggagaaagcggcgtcgtttctgtaaacgcgggatcatccgcttttaaatccccgtatacctcatctgttgaaatatgaatcagcttcttggcttttcctttcaagaccgcttccgccaatcggtatgtccccatgacatttgtggtgataaacggctctgcttgggaaatgcttctgtccacatgcgattctgctgcgaagtgaatgacgccatcgtaggtctcatcaaacgcgcggtcgatatcctcctgaacgctgatgtccccttttacaaagcgaaaacggctgttttgctttaatttttccatttcctccgggtggctggcgtacgtcagtttatctaaaacggtaatgcgcgcatccgtttccctcagcatgagctttgtaaacgtgagcccgatgaagccggcaccgcctgtaattaaatatgattttgccatcacttttcgtcctgtcctttccgtaaagcctggtgtacaagctgggaagcgagataaagcgattcgtgagttccggcatctacccaccagcctgataacacatcatacgtaagctggctgttttcgatgtatagattattcacatcggtgatttccagctcgccgcgctttgatggtgatatttgttcaatatatgaaaacacctctgcatcatacatataaataccggtaacacaaaggttggtcggtggctgttcgggcttttcgatgatggaacgaatccgcttgtttttctcatcaatctcagcaatcccgaagcgttccgggtcatcaacttctttcagaagcacttttgctcctttcccctgctgttcaaagcgttctgtataaggctttaatgaatcttcaaatatattatcacctaataataaaatgaaagactcttttttcgtaaagcgctttgcataagacagcccatccgaaatgcccgatgctgccggctgtacttgataagtgatagtaacgccaagctcttccccgttcccaagcagtttgtaaaattgcggcatatgctccttttggctgatgagtaaaatgtcttttattccggcttcctccagcttcataatcgaccagtatatcatcggatacgggcctacaggaagcaaatgcttgttgacggctttcgttaagggcataaggcgtgagccgtttcctccggctaaaataacacctttcacattaacacttccttacatgcatttttatatctcttgttcatataaatcttgaagaatagctgttacccgtataatgcctttgccatccacgagcggccttcctcccttgtgcaaagaaaggcgaagaggatagctgctcataatgcgtgacatctgatagatgagtgtttcatccggtacaagctcacccaagccaagatcaagagcggcgccttggtcagcaaatgttttggctgttgccgtttgatgcccaacctgagaaagaacaaggcacggcacgccgatgcaaatggcttcatatagagagatgccgccggcgacaatggctgcgtccgcttgtttcatcaaacccgccatatcatttgtctgttcgatcaccttgtactgcggcttcttttcgatccgccttcggactgcctcttgatgcggtgaagcgctccccatcacaaaaatcatgtttttgtcttttatgccggggacttgatcagcggcagccagcactttaaaaataagctgcttcggatcacttcctcctaatgcaacaaggatattgcggcagtctttcttaagtgtgtaatcctctcttgcggcctgaaaggcggggtgaagaataagatagtccggaccttcataaatgcgtgtgtttccctgaacgtacaccctgcttctgatgtcaccgtaaattccgttaatgactgcgtcactatattgaattgatttaccgtttttctcttcaaaaagaacaattttcgcatctgtctccgtctttattttctttaacagctctgcaggcgcgcctagaatatcaaacaaaagcaaatcaagcttcttgctttttatttcccggagaataaattcgtgctgctgcagctccggctttacgatgacacgccaatgctcttcatgaagaaacgcttcagactcctgattcgtataaaacgtaatcaaacatcgctgtttgagcccctccgcaagtctcttcatccggacaacatggcccattcccttttcatagccgccgtctgcgaagatcccaacacgcatggctattcagcctctcgttcgattgccgcatcggggttccggttcagaagggtgataagctctgaggcggatacaccagggcgctcgcctgctttttgatagagggcctttatcgattcatagtcttcctttgtatcaatggtcagccgatattgaggggcgcgaaatcgttccggcgcctctaaaaactgaacacgataaagagctggatgattccttatatataacgtgacatgctcctgatattgatcctccatattctgaatacggctgatgtcaattaataggttggcgttgaccacttcgccgcaaatccctaatggggcattcaggatatacgtataatccgatccttgatcaaaatgcgccttaatcattacatcgagcagctccggatcgacaaacggattatcacccgttaaccggatgatgactgacggtttaacagcttctatgaccttcacaaacctatcgaggacacgttcttcgctcccgcggaaaacacgaaagccttgtttgatacagtgcgcctctaatatgtcgtcagtttctttgtcagacgtggcgatgacaagattatcccgatccttttggtaaaacgcgcttttccggacacggtgaacgagaatgtcaagtaaacgattcgatccgagcggccgaagcacttttcccggaagccttgttgaacccattcttgcttgaatgataaagagaatatcattcatgaaacgggctgtccttcagtaaaatgtcatcccagacaatgcctgtgtcggctggaatgtctcttacagcccgaacaccgctggtcagcagttcaaaaaatctcgggtgcagcccctgcggcttttgtccgggccgaagcactgcgatattgtcttcactaaaggcttcacctttttgaatcggagctgttgtaaaaatgcctctgtatgcaaaatttctgatttctccttcgatggaggttgttgttttgtatgaactgccaagcagtttttcagagaccggctttgtgatcccctgtttcagctcagcttccgttttcctgatgccatcgaccatttctttcaattcatccggatttaatgcaaacgagtggtcggcacccggcagatctttatcgatcgtaaaatgcttttctatcagttttgctccgagccgaaccgcggcacacggcgcttctgtcggatgctcgctatgatcggagaagccgattactgcctcaggaaaagcggcggcaagcatcggaatgacgctgaggttgctgtactccggcggtgctgggtatttcgccacacaatgcattatggcaatttgattgtttccctctgccctgatggtgcgccaagcttcgtgaacatcagagatttcagctccggctgtcgagaaaatcatcggcctgttcagccgggcgacatatttgagcagcgggagatggttaatttcataggatgcgattttaaaagcgctcggcgaggtagactgaagcagatcagctgacccctcgtcacataccgtacttaaaaagatcacctgcttttcgcggcagtaatccaatagcggtaaaatccactcagcgggcatttccatagattgaaccaaagaaaaaatagagacgtccttgcccgctgccgtcttgtacaaaccaggatctttctggtacatcctatcagcttggaacatttgaaatttcacggcatccgctcccgcttccgccgcggcgtctatcagcgcaaaagcctgatcaagcttcccgtcatgattaatccccgcctcagcaataataaaaacaggagcgtctttgcctacagttttattcgcgatctgaaacgctgccattatttcgcctccttgcccggccaaatatgataatagtaatacgattgttcagcggtgaagcccattcgttcataaaggcggatcgcccttacattgtgaagctgcgtccccgctgttaccgttctatgcttctgggtctccggttgttctatgagattcgccaataaatgaaatgcaatacgttttccttcaaatcccggctttacagccatcaaatcgagaatgcattcatcatctcttgataagccctgaagatagccgatgacctcgccattgtgtttagcgacaatattgaccgccgcccttccattcagattgtttcgtgtccactcctgaaatattttgtttgctgcatcgcggctgagatgaggatcctgaaaatatctgctttttgtaaacgagtctcgggccagctcacatatcgcttctgtgtccccgggctcaggcgggcccagttcaaaaaatggcggtgttttgtcataaaaagacggaggcatcgccagcttcagcaaactcccgacaaagtaagaggatggctgctgctgtatcacatgcgcggctccgatatcttcagccggaacgcggacaaagataaaatccgtttcatccatttggcgtacagtataaaaagcttcaaacagcctctttagctgcccggtactatttgccgcaagaagtttgacgttgatgactttcttctgaagcaccttgctttcccacaaagaatcttcgtaaagcaatacgccttggagcctgctgttttcaaaaaggccgagggaaaattgatacggaacatccagtgtaagctttctgctttggagaaattcctcaattgcctctttggagacattttcttttaccgtatacacttaatcagccccttttacgatatcccgcacagcttcaatgacatcatctacatcgtcgtcagacattgatggatagagcgggagagaaagggttcgtttatagtaattcatggcattcggaaagtccgcttccttatatccaaattgcttttgataatacggatgaatgtgtactggaataaaatgaacgctagtgccgatattgtatttatcctttaaagccgtaatcatttcgctgcgcgtaaccccggcttttttttcatcaacttgcagaacatatagatgccaggcgtgcctgccgtcatcatggacaaacggcgtgatcagcccaggaatctgctgaaaagcggtttgatagcggccggcaatctcttctctccgtttctgcatatcatccagccgtttcagctgatgaagtccgagggccgcctgcaaatcaaacatattcatcttatagccgggcgattcgacttcatagtaccagctgccatttgaagaataacggttccatgcggctttactcatgccgtgaaggcttagcacccggatcttatcggcaagctcctcatcatcagtcgtcagcatgccgccttcccctgtcgcgaggtttttggtggcgtaaaagctgaatgccgttgcatccccgatagaaccgatcattctttgcttataagtcgtatataccgcatgtgccgcatcctccagcacgaataaaccatgattttgggcaacagccaatattgcatccatatcgcaggactgcccgccaaagtggacgggcacaactgctttcgttcgcggtgtgacggccgcctcaagctttaccgggtcaatattgagcgtgttttcgtcaatatccgcaaacacaggcgtcgctcccgtatgaataatcgtattggcggtcgagctgaacgtaagcggagaggtaatgacctcgtccccgggcccgatcccttttgctttcaaagccaaaaataaagctgcggtacatgaattcaccgccacggcgtgcttcgccccgacaaacgcggcaaactctttttcaaactgctgaaccttcgggcctttagaaagccatcccgattcaagcgtttctgtaacctcctgaatttcttccttaccgattaacggcaatgagtaagggagaaaatgatttctcttttgcaccatttctttgcgctcctatcattttattcagtatcttcccgcctgtaatcaacccctgttttggctttcagttccgcaaataaagcatttgttgattctgccaccggataattagccgctatgaatgccaggcgcgcctcttctgctttttgatgcacgtcgggacttcgaagaacttcaaccaaggtgtgcaccagttcatccggctggtcaaacataaaatcgccaagagactcataatacggatacgagcgatttccggacgattttccgatcagcacaggcttttgaaacagcatggcttcaagaccgactgtcgaggtctgcgtcactgcggcatcagcatacggcagcaaatcataaagctccagctcctttttgatgactctgcatgctttatgttttttcgccgcctcgtgatacagatcaagcttgttttttccgatttcccacgggtggggtttgataatgatctgcagctgcttctgatcagaaagcccctgcagcacaccggaataaaagtcttctgaaaagggctgagtggcaatgagcacaatttttttagtcggctgaaaagcaagttttcgatagaatatggacatatccataggcgttctgttaaaaatctgatcgaagcggggatgtcccgttacgagaatctgctcgggtttacagccttttcgtatgaaccactctgcttcatacgcaccaaaaacagcttgataggttgtaaaaacaggaatgaaggcttcatctcccatcaatgcgccatgctgaagacaaatgctgacggccccttttctttgacacatgagagcgagcaccctgctgtaaatgtcttctgccgttccgacaataacagctgaaatcttttcctgttcaaacagcgcatcaactgtatcaatggcctctataaataaaggaatatctttgaaaagccggtcgcgaaacgcttgatcaccaaatgccgggtgatcatcataaggggcgagaagcgaacaggctgtttcgagatactgcttcgaatcgcctttttggcatgaatccgcaatctcccgcttgctaattacaggcagatcacaataatgcggcaaactccatctggccaaaacagccgttttttcaggatcaaattgatagtaatttccgtttgaaaaacgcaggtaatcaaagtgcaaaatgactttccctttaacaggtttgtcatttgttttaacgattttttggattctttcttcaaaaaacggctgaatctgtccctcatcgatatgctgatccaccgatccgaataattccggttcttcttccatcatcaccctcagctcagggctgatgtattgataaaaattactgataagcccaagcggaatccctttgtagcgaagtttgtcaaaaagctccacgtacttccggtacagcacccaataattgcttaaataggccgacaagctctcaccccattccaagcttttttaatgattcacgcagctctcggcaatttcgctgcggaggaaggttcctgacaaattcatttttttctgattcaaacagctgaaagtgaatcgattggtcggtaatataattcaggtccagctcctcatccagtgggtaaaacggataaaaatgattgactctccaaaagaaccgcgcatctcctatacggtaaaacgccgggctttcatcccaataggagccaaacttctcctttaccttctcaagcaccgaatacctgtgcatcaccgagcaatgatcaattgcgcacggtgcgttccatgtcacttgagcggcaggcctgacagtttcttttacaatgtcgcgattctcgtttaaatgataggttttggaggctgagtaaatcacagccttttcaggatgggtatcgagctcccgcaccattttcaggaggcggtccggcatatagatgttgtcatccgtcgcataggtgatatattcaccctccgccatctcaatcgcctgattgatcagtgccgcgtatctcgttttttctgttctttccttcactccagatatatcgctttgataaaaacgcactcggttatcattcaaaaaaggacggattacattcagcgtctcttcattggagttgtcatccataataaacaattcaaaatctgaaaatgtttgtgagagtatgctagaaatggactttgccacataatcgcttttgttatagctcgtcataatgactgatactttaggcaaatcctacacctccttcttggaacttcacacctgaaactatcgttatcttatgttgcttatgctcaagttgcgctagggatacaaaccaatatgcgaaaagtttgtgtatgtctctgaaaaacagcggctgcccagagcgaaatctgatcggtccgctgttctttttcagcataatccaagcatcagcctcataaggtgaaagagataaaaatcgcaccagcgactaagatcgttttccatcggaggtgagtcatcgcggagcgttcacctatacatccagaacatgttttgaatggttttcataaaaaggaggaacgatatgaaaccgaaaaaaaatcaatatcagcaaatgcaggcatttgataatatgcaggggtatcagcctcagtttggcgccaacccgtacccgcagcaaggccaaggctcacaaatgcagccaatggggatgcagccaatgatgccaatgcagcagggacagcaaggacaacaaggacagcagggatttggattcccgggccagcagcagggcggcggttttcaaattccatcggggcctacaccgtcaggaccgggccaaagcgttcccggcatgctgcctgttgaggaatcttacatcgagaatattttgcgcctgaatcggggaaaaacggccaccatttatatgacatttgaaaacagcaaggaatggggctcgaagatttttcgcggcgtcatcgaagctgcgggccgggatcacattattatcagcgacccgaaatcaggaacacgctacctgctcctgacaatctacctcgattacattacatttgatgaagaaattgcttatacgtatccatattccatggcgtcctattcgccaagataagaaaaaagccaatcactcatatgatgaggattggcttttttgattatagatatttgacggctgcgacaacgatcataatccaagaaataataaacgccacaccgccgagcggggtgatcgctccaagaatggagatttgcgtcacacttagaatatataagcttccggaaaacagcacaattcccgcaaacatcagccagccggctgtcgtgacactgcctatgccggataatttatcagccagaaacgcgacaacgaataacccaagggcgtgatacatatgatactgcacgcctgtgtgccaaacctgaagatatttatcaggtattttcccttctaatccgtgagcgccgaatgctccgagtcccacggcaagcagggcgttaatagcccctaatatgataaaaactttcatctatctctcccgccttttcgttaaactcatatcatttatcttatcgcacctgcaccaaaattcaatgtttgttctccgttgacacgagattgtcggattttctcctgcgccaaagctggaactggtcagctgctattgcagcaagcgtccctaatacgagcccgttgcttaatagagaaataaataccggatgcaatccctttaacgcagtttcaggaacaaacatgataccgacccctgtcagcagtgagatgccgatgatagacctcaccctttttgattcttctttctcatacgaatcaaattcggcaaaggccagaccgcccattgcggagaacacaacaaaattcaccgcaaatccaacgggtgacggcaggctcgcaaacgtattcataaaaaacgggatcacgctgattacgataaccagaatactgccgagtataaacggttttttagaaggcatcttggtcgtttcaataaaacctgcggctcccgaaatcggaacaggcgcaatagctcccgtcaaaccgctaagcagatggctgaatgaagctgcaaaaccggcatggcgttcatgatgctttccatcaggctgtttgctgaattttttcacggcgatgtccacgaccttcatgctcgccagcatattcacgatcagcaagatggtaataaaaatagaagtgatgatcaggccgctgttaaataacggtggcccaaaaggaaacagggaaggcagctgaaacagccggtccggcatttcaatcggctttgccgctccggcagccgcaaacagcacccacccgccgaacaaggctaataaaatagaatattgcttaaaaaacacgatgttcgaatttgtcattataaaggcggcagcgatcacaacaagcgccaggccaaatacaagaccgtccaccccgtcctgtcgataaccgattccgagaattccttttataatgggctgactcagctgcatgacaagaagcaataaatagacgcccgttacaaccggagtaaacaattttgcaagtctgtcaatgaccttgaaaacacttaacaaaaagaaacatacagcgcttacaagaagagctccctgcaacccccgcagtgtgtctccatatgtcgcaaacacagttcccgttagccctgcgtagatcgtatacactccccaccacaagccggctgggctttcattgatcggcagtctgtggcctttcaaacactgaatgacggcggcaatccccagtacaaaaaaagtgctttgaatcaatctcgcagaatctgagtgatccagatgaaacgactgggcaaccgccaccggaacaactatcgccgcagcaatgataaacgctgtccattgcaacgcgccaagaaccaatttcacgtaagctcaacctctctctttaaaaatcaaataaagactctccgtttccatcctcttcctgcttctctttttcttgctttcgatatttgtttaatcccgcgctccccatcattttttccatcatcagctggtctgtcgatggcggcgcggcaggacttggcgtaacgctcggctgtatgcggggcgcgctcgcgttctccggctgatcaagcacgacatcacacagagaacggacaaccgctacataacgcttcagctcctcatcccgttcagctgtttttgcttttttcagctcctcttccatcttttgaattaatgcagatatatgaatgttcatgaagcaccctccaaaaaaataaatgttgtcttcctgcattttatcaaattcctgctgtaaacgcagatatgagtttgttattttttctgacaaaccttgcgcgattgacaagcagaagagatttttcacataataaatcaccatacattacaaaaaggagaaacggaatgaacagcatcccctctatcatcagcaagcataaagcctattttgcggcgggacatacgagaccgcttgaatcgagactgaacattttgcgaaagctgaaacaagccgtcagaactcatgaagccgatctcatagccgctctctaccaggatctccacaaatccgagcaagaagcatactcaacagaaatcggaatcgtcttggaggaaatcagctttgtcatgaaacggctgaaaaaatggtccaagccgaaacgagtcaaaacgccgctgactcatctaggctccaaaagcatcatcattcctgagccgtatggaaccgttttggtgattgcaccttggaactatcccttgcagctggcgctttctccgttgattggagccattgcggcggggaacacggtcgttctcaagccatcagaatatacgccggctgtttctgctattctttccaaactcatcagcagcgtttttccgaccgattatgtcgctatggcagaaggcgggcccgatgtcagcacagcattattacagcagccctttgactacattttctttaccggcagcgtagccgtgggaaaagtcgtcatggaggccgccgccaaacaattaattcccgtaaccttggagctcggcggcaaaagcccctgcatcgtccataaagatgctgacattcagcttgccgccaaacgcatcgtcttcgggaaatttacaaatgcgggacaaacctgcatcgcaccggattatttatttgtccacgaggacatcaaaacgaagctcacagaagaaatgaaccgtgcgatcagagaattttacggccctcagccggaacggaatccgcagtacggcaaaatcgtcagtgaacggcactatcagcggctgctcagctttctgaatgacggcatcccactcacaggcggacaatctgatcccaatcatcacaaaattgcgccgaccattctcgaacaagtgagagatgactctccagtgatgcaggaggagattttcgggccgattcttccgctctttacataccgcaatatcggggaagtcattgagaaagtccaatcgcgccctaagccgctcgccctgtatctcttcaccacaaacaaagaaattgagcgcgctgttttaggaaatctgtcgtttggcgggggctgtgtcaatgatacgttaatgcatgttgcgacgccgtatttgccattcggcggcgtcggggaaagcggcatcggcagctatcacgggtttgacagttttaacacattcacgcacaaaaaaagcgtcgtcaaacaaacgaaccgtttcgacttcgcatttcgttatccttcctccaaaaacgggctgcgaatgattcgaaaaatactcaaataaaaaagcgcagataacctgcgctttttacaaatccttaatacaccaatcaatcggcgcctctcccattttctccaaataggcattcgcccgggaaaacggtctgctcccgaaaaatccgtttctcgcagaaaacgggctgggatgcgtcgattcaatgataaaatgcttggacgtgtcgatccgttcttttttcatttgggcatgccgtccccacaaaataaaaataaccggccgctccctttcattcagcacgtcgataatccggtctgtcagtcgctcccagcctttccccttatgggaattcgcctgtccgcgccttactgtcagcacagtattcagcaaaagaacgccttgctttgcccagctcactagcgatccgtgatttgggatgctgcacccgatgtcctgctgcagctcaagaaagatattttttaacgaaggcggctgctttacaccgggcttgacagagaagcttaaaccttgagcctgtcccggcccgtgatacggatcttgacccaaaatgacgaccttgacatcatcatatgatgtataatgcagcgcgttgaaaatatcccggctgtccggataaatcgtttgctccgcgtattccctcttcagcatctctctgagctcttgataatacggtttctcaaactcttcctttagctgattccaccagctgtcttgtaaaagctgtttcaagattcaggcctccttacgaacgatgaagtctggaatagacaggctcgccatcccaaaccatttcactttttgcttcccgcctcttcatctcaggctcttcaagcaggacggcaaagtttttcgtcggcagctccccgagtccgtgcttttcacttaaacgatccaaatattgcttccgcttggcgccaaggtccgcagactgattgtctcccacgtcactgaaggcataaatcacactggcgcaagggacacgcttcacccggtaatccttggctgcgcgcagataaaaatcccaatcccagtaattgtgcacatcagcatcgaaatacccgatttcatcatgcagaaaacgtctgtacatgctgcccgacggcacgtatgtagaaaacactctcatatcctcatagtcagcggtataagcaaacaatttccgtgacactggataccttgttccgtttttctcttcaaacgaaactatttccgcatcagaatgaacgaagtctgccgtttctatttcctttgccattttctcgatatgccctggcgtaaagaaatcatcgtcatcacacagcataatgcaatccccagacgcctcttttacaccggcatttctcgcagccacatgccccgagttcttttctaaattgatgacagcaatcggtagctccggatacagtgctttgaccggcacgaccgattccccggcatcattcacaataataatttcatacggcttcaaggtctggcgggaaatcgactccaaaagctcacacaaagccggaatccgattataggtcacaattacgatagaaatcttcatgatgctctccttctcattttcatagtcatgtactattaaaacatatattggacgggagatcagtgggaatatcctactgaaacggcatactacaatgatagaaacagcaaagtggctccgatcagaagcaccatgatcagcatcagatctccaaagacatgaaagaaatctttcatgcggacgccattcggaaggataagacgccacagcttagattgatagaccggcagcagcaccagtgcataagaaagacacaaaaatgtaaaagccggcggcacaaaagcacagcctgcatcgtcccaattcatcatgatgtctttcatactagatccatccaataaaaacaaagatatcatgagggctagcaacacaaaggaccccaattgaacctcaaacaggcgcattttctggttatatgcaaatcggaccgcccaaaaccagacataagcatatgaacatagcagcgtaagaatggcacctgctgtaaagacgacatcaggcagccgatcaagcagaaaaacaaaaggcaagctggctgccatagccaagagcatgcagccaccagtaaacaaaaatactgccccatgagctacaaaaccatataaacaagagctaatcctcacgacatacacctcctttacatagaaattctatgtatatacctaaaaaatcagacaagctgacgcctgccaatataacagcccattcggccaaataacggaaataacagcgttgcaaaagcacaagttccaacaaaccaaggtgtcaacaaggattgaaacagcgcagcaggaattacattgaatagaaaaacaagcataaaaatgacgtttggcaccattgagatcagaatcgtatgtagaacaagcttttctccgcgttttccaaactccttcacgccttgatacccaatcagcacccagtagatcatatatgcagctaagatcagccaaacagaaacagaaatgcctttccatactgcttgaacaaacggtgattcaagccatacatgcattattgtaatcgcaatgccgacagcgaatagggcactgttacagaaaagatggaacatcaaaaacgcacggaacgttactggctgtattttcttaaacgaagaaacaatgtcagttggtgttccaaacgcctgcaataaagtctgcatagcttcctcctcactctttccttcctgaaaagagcgaaacagatgatgttcaatatggctctcaatctcttctatcatcgcctcaccctcaggaagccctttaagcccgcttttgatttcggatacatatgtttctttatccattttgtccgctccacttcagtattcggtccatcatggctgaaaatacgctccattccttcgtgcgttccgccagcacttctttgccctcgtctgtaatccggtaatatttgcggtccggtcctttctcctgcttctcccagtaggaagaaatatacccttggcgttcaagcttgtgaagagaaggatacaaggtcccttctttcatctgcagttcatttccgctgcggcttcccatttcttttacaagctcatagccgtacatcggccgctcgttcagaagcgtcaataccaatataaccgtgcttcccttaaccagctcacgatttaacatctcaaaacccctacctagttttcttatgtagcattttacgaaagcccgttgagattgtcaaatgattcctatagatcttctatattgtgatacagagaaaatctaactataatgaaagacaaaacacgatggaggttcaagacatgtctatgcataaagcactcaccattgccggctcagattcaagcggcggtgctgggattcaagctgatttaaaaacatttcaagaaaaaaacgtatacgggatgaccgccttaacggtgatcgttgcgatggacccaaacaacagctgggaccatcaggtattcccgatcgatactgatacaatccgcgcccagcttgcaacaattacggacggcatcggcgtggacgccatgaaaacaggaatgctgccaaccgttgacattatcgagcttgcggcaaaaacgatcaaagaaaaacaattaaaaaatgtggtaattgaccctgttatggtttgcaaaggtgctaatgaagtcctttatccggagcacgcccaagccctgcgtgagcaattggctccgctagccactgtcattacgccaaacttgtttgaagccagccagctcagcggcatggatgaactaaaaacagttgacgatatgatcgaagccgcgaaaaaaattcacgcactcggcgctcaatatgtcgtcattacaggcggaggcaaactcaaacatgagaaagccgttgatgttctctatgacggagaaacagcggaagtccttgaaagcgaaatgatcgatacgccttatacacatggcgcaggctgtacgttctcagcagccgtgacagcggagcttgccaaaggtgcggaagtcaaagaagccatttacgcagcgaaagaattcatcacagcggccattaaagaatccttcccgctaaaccagtatgttggtcctacgaagcattctgcactgcgcctgaatcaacaatcataaacaaaaggggctgcctaacaaagaggcagccctttttaaatcaccgaagacttttcacagaaaaaactgccgatcccatcggcagcctgtttatttgatttttaaattgtttgcagatttcctcaaaaatgtttctatcgactgaacaaaaagtgcatattccttcatttgttcatatgcccgcgtgagaatttccgccgtttcactgtgcggcgttgttccgccaagcatttttttcagctgaagcagcacatccttatattcttcccgcttatcttcaacttggttagcagccttttccaaacattccggtgttatcttctgttcatttatattcaagaaaacaactccttttacagaaaaaaatagtaggttatcgttgaagaatagcacagatggctcagatttcacataagaaaatagaaggattttctacataagtgtccaaattctgacattcatttcagatttcccggtcgaactggctgttacttcatgatttcccgggaaaggaaaatatctcgcactaaagacctcttctccgttattgataaagatttcaacagaggatgcgtcgataaacatgtgcacggtatgcaaatccttgatgcggcaatgtctcgcttctgttctttttccgtcaaagccctttcgttccagcgtaacattccccttgtctttatggaaggaaaacgtagccgttccgcggatactgattgaaaagcctgactctgtatgaatgtcttccagcagaatctcagttctttcaggtttttccactggaagcgtaccagatgatccatgcatgttgatgtgtatttttttctcatttctgcgcatggcttttagctcaggcagcggctgctgaatcagcttctcgcctgatattgtcagctgtctcggcagcgtcatgcagtgaatccagtgatagtcaatcgtcggatgagatccttcatcctggtcaggcacagccatccatgcaaacaaaattcgtctgccctgatcatcttcaagtgtttgcggcgcgtaaaaatcaaaaccttgatcaagttccctaaaatcaccatgcttcagttcaggcttgttataatcgagacgcccgacaaaataacctgactgatatacgttctgataaaggaaaccgtcagcctcaagcccttgaggcgaaacaatcagcacgtccgatccttgaagggaaaacaaatcagggcattcccacatgtatccaaaatcgtccagcccgttgaagcccgcgccggttatcgggccaagaaatctccactcactcaggttatcagaagcaaacaatacagcctgccctttcaaattctctgtttgcgcaccaatcaccatataccatgtgccttcatgctcccataccttcggatcgcgaaaatgcgccgtatatccttccggaaggcgggcgacaacaccctttttctcaaaggacagcccgtcgtcagaaacagcaaggcattgatacgtttcccgatttccatcctgatccctgacatttcctgtgtaaaacagatagagccgatcgtctttcgtgacagcgctgcccgagtagcagccgtttttatcaaaccaatcactcggagccagcgcaatctcttcccgcttccaattcacaacatcctgtgtcgtataatgcccccaaaattttgcgccgtgccccgtctgaaacggctgccactgaaagaatacatgatagctgcccttccaataaatcacgccattcgggtcattcagcagcccaaccggcggcatgatatgaaaatgctggcggtgcggatcgctgttagcgatgggctcttttttctccacttcttcataagcccggcgacgaagctcctggtcatgtgctgtcattttttcctctcctcatcctcattaatcttcatgacaaatgctgcaatgaacgctgacactgctgcaatcgccatgccaatcagatagtgaatcaagttgctgacgccaaacggagccgcaatggcgatcatcggaattcccgttaacccgtaagcgtttgcagctacatgtgtaaagacgacatatgccccacccaatgcgcctccgatcatcgcggcgataaacggttttcggtagcgaagattgactccgaatatgacgggctcagtaatgccgagaaaagcggaaaatgctgccggaagcgcgatttcttttgtctttgcctttttcgccataaagaagacggcaaggcctgccccgccctgtgcgacattcgccattgaccagataggcagcaagtagtttttgcctatatctgcaattaaccccgcctcaatcgcatggaagctgtgatgaacacctgtcagcacgatgagtgaatacgtgcccccgaaaatcaaacctgcaacaaaaccggcatggtcatacacataagttaaagcaaccgtaatcccggagccaagggctcttcccagagggccaatcgcgataaaagcaacaaacccggtgacaattacagtaacaaaaggtgtaacaagcaagtctaccgcatgcggaaccacttttcttgtccatttctctaccttgctcattacataaaccgccagcagaacagggatgacagttccctgatagcctagaagcgcgatatcaaatccgaaaagatgcatataatcaggtgtggcttccgccaatccccatggatttaaaagagacggatgaatcatgattcccccgatgaccgctcccaagtatggattgctgccaaactcttttgaagcgctgaccccgattagaatcggcaagaaaatgaatgctgcacttgaaaacatatcaagcagctgcaaaagcgcagaatccttgctcatccaatgaaacgcattgatcatacccagcaatcccattaataggccgctggctacaatagccgggatgattggaacaaaaatattagaaagcgttttcgcaaatctcgcagcgggattcagcttttcttttgccgcatcctgatgatttacgtgttcttcacgctcgatatcagcttctttagaaaaggcatcgaatactttattcacaaggcctgttccgaaaatgatctggtactggccagagctgctgaaagcccctttgacgccatcaagctcttctacttgtgcttgatctatctttgattcatctttcatcactaaacgcagtcttgttgcacaatgagccgcgctgataatattttctttccctccgagaagctcaatgaggcgttttgcagtctctttgtaatccatctatttctcccccttttatttaaacaaaaaagacctaaaattcgccaacgaataaaggacacagcgatcctttttcatttacgcaaattttaggtcttgcctgctttaccagtcacaatcccgcttattcagattaagaatacgctttcatcataaatcatgacagcgttttcgtcaactatttttttagttaaatagtttgataaaacatgtagacaaaaattcgtaaaaattaattgtgaaatacttcacaatatcgtgctatactatgctcaatcatgaaagaaagcaggaaaagacaatggaaactcaagcattgcaaaaggttgaacagtatgctttgaaaaaacaaaacatattcgcttcaagcaaaatccgttatgtgcttcggtccattttggccagtatgtttattggttttggcattacagccgcaagcaaaacaggcagctatttctttatggctgattctccgtttgcctttccggcagccgctgtcactttcggggccgctattctgctgattgcttacggaggcggagatttatttaccggcaacaccttttatttcacctataccgcgctccggaaaaaactcagctggcgcaacaccctgtacttgtggatgtcaagctatgccggcaatttaatcggcgccattctgtttgccatcctgatcagcgcgacgggactttttgaggagccttctgttcattcctttttgattcatttggcagagcacaaaatggagccgccggcttccgaattgtttttcagaggaatgctgtgcaattggcttgtgtgcctcgcctttttcattccaatgtctctcaaaggggaaggagcaaagctttttaccatgatgcttttcgttttctgcttctttatttccggctttgaacacagcattgccaatatgtgcacattcgccatctcgcttttgatcgagcaccctgatacagtgacactgatgggagcagtcagaaacttaatccccgttacgctcggcaatctgaccgcgggaatagttatgatgggctggatgtactacacactgaatcctgatcaataaaaaaacttccagagatcactccctgcaagtcaaagcggttattccgagagatcttgaagacgctggacatgcagcgtgatatagccggcctcggattccggcaaatgtaattgatattcatttttcaaaaactccgccagctccagcgcacattgataggcgaatgaatactttttttggatgaaataaagcatctcctcgtccatacgatggagcgcttcatttgattccaaccggctgaccgcgtatcgcaaatgcgtgacaaggcgttgataggaaatgctgttttcatccacctttcgattaaagtattgttctattttctctatcatttctttgatcatggtcgtatgcttcagcgctgaatacatgctctccgcatccatcttcgccgtatggatgtgaagggcaatataacccgcttcatcttcaggcagagacacgcccaatgtctcttttacatgtccgatcgcccacaggccgatctcgtattcttttttatagagcgcctttatctcatgcagcaatttattctgcacaagcaacccattttgaatcctttcgatcgcaaaggacaaatggtcggaaagcgcgatatgaatgtgatcgctcagcggcgccgcgagctctccttccgcatagctgatgatatcctcagctatttctacatgctcctccggcagtgtttgcaggatttgtttgaacttttcattctcgtcgcgcacgacaaagattttttccactttattcatagggatgagatcatttttctttttttgaaaagcgattcccggccccatcacgattttttcctgatcatcctcttttattaaagccgcattgttgtttaatactttatagattttcaagaggttatctctcccgccaatttgcttttgactgggattttacctccttttgaccgccatgtaaagatgcgggcccgctctctcctgctttggcgattccttgaaggcttgcaaacatcttcttttataaagcgcggcggctttcgctttctgcttttcttcctcattcacagccatccgccactcataaaacgaaacgagtcctgcggcctgcacagccgcctttctttggtatgtacgctgagccgaatagaccgcggcagccgcagtttttctgtccggcgtcacccagttcatcaaaaagaccatccacacccgtaaagatacaagcaaacgtttcatagaaaaacatccctccgcttctttttggcaggcagcctttttagcagcccgttttctcagccgcagcccgcaagaaaagacggccgatttcttttctcgcaaactagcggctctagcaaaactcatgactctatgatagaccgtggaaagagaattctttgtcacaatatgagtgaaaaaaccaactagtttttagaagttttgttgaaagctgaaagaattgaaatgaaaattggagaaccgctttgaaaactttatacacaagttatcccaaagataagaacaacttaatcacaagagatatccacatgtccacaaactctatctatattttgtatacgaacgtatattcctaactatatatatacacaggtttattcacttatacacagggttctgtgtataactccttcgttatacacaaacaaactccaataaatggtccaaatgacacaaggatttttttgaattttcaagaaatatatactagatctttcacattttttctaaatacaaagggggaaacacattgaaaaaggggatcattcgctttctgcttgtaagtttcgtcttattttttgcgttatccacaggtattacgggcgtccaggcagctccggcttcttcaaaaacgtcggctgatctggaaaaagccgaggtattcggtgatatcgacatgacgacaagcaaaaaaacaaccgttatagtggaattaaaagaaaaatccttggcagaagcgaaggaagcgggagaaagccaatcgaaaagcaagctgaaaaccgctcgcaccaaagcaaaaaataaagcaatcaaagcggtgaaaaacggaaaagtaaaccgggaatatgagcaggtattctcaggcttctctatgaagcttccagctaatgagattccaaaacttctcgcggtaaaagacgttaaggcggtgtacccgaacgtcacatataaaacagacaatatgaaggataaagacgtcacaatctccgaagacgccgtatctccgcaaatggatgacagtgcgccttatatcggagcaaacgatgcatgggatttaggctacacaggaaaaggcattaaggtggcgattattgacactggggttgaatacaatcacccagatctgaagaaaaactttggacaatataaaggatacgattttgtggacaatgattacgatccaaaagaaacaccaaccggcgatccgaggggcgaggcaactgaccatggcacacacgtagccggaactgtggctgcaaacggaacaattaaaggcgtagcgcctgatgccacacttcttgcttatcgtgtgttagggcctggcggaagcggcacaacggaaaacgtcatcgcgggcgtggaacgtgcagtgcaggacggggcagatgtgatgaacctgtctctcggaaactctttaaacaacccggactgggcgacaagcacagcgcttgactgggccatgtcagaaggcgttgtcgctgttacctcaaacggcaacagcggaccgaacggctggacagtcggatcgccgggcacatcaagagaagcgatttctgtcggtgcgactcagctgccgctcaatgaatacgccgtcactttcggctcctattcttcagcaaaagtgatgggctataacaaagaggacgacgtcaaagcgctcaataacaaagaagttgagcttgtcgaagcgggaatcggcgaagaaaaggattttcaagggaaagacctgacaggcaaagtcgccgttgtcaaacgaggtagcattgcatttgtggataaagcggataacgctaaaaaagccggtgcaatcggcatggttgtgtataacaacctctctggagaaattgaagccaatgtgccaggcatgtctgtcccaacgattaagctttcattagaagacggcgaaaaactcgtcagcgccctgaaagctggtgagacaaaaacaacattcaagttgacggtctcaaaagcgctcggtgaacaagtggctgatttctcatcacgcggccctgttatggatacgtggatgattaagcctgatatttccgcgccaggggtcaatatcgtgagcacgatcccaacacacgatcctgaccatccatacggctacggatcaaaacaaggaacaagcatggcatcgcctcatattgccggagcggttgccgttattaaacaagccaagccaaagtggagcgttgaacagattaaaaccgccatcatgaataccgctgtcactttaaaggatagcgatggggaagtatatccgcataacgctcaaggcgcaggcagcgcaagaatcatgaacgcaatcaaagcagattcgctcgtctcacctggaagctattcatacggcacgttcttgaaggaaaacggaaacgaaacgaaaaaagaaacgtttacgattgaaaatcaatcttccattagaaaatcatacacactggaatactcatttaatggcagcggcatctccacatccggcacaagccgtgttgtgattccggcacatcaaaccgggaaagccactgcaaaagtaaaggtcaatacgaagaaaacaaaagctggcacctatgaaggaacggttatcgtcagagaaggcggaaaaacggtcgctaaggtacctacattgctgattgtgaaagagcccgattatccgagagtcacatctgtctctgtcagcgaagggtctgtacaaggtacctatcaaattgaaacctaccttcctgcgggagcggaagagctagcgttcctcgtctatgacagcaaccttgatttcgcaggccaagccggcatttataaaaaccaagataaaggttaccagtactttgactgggacggcacgattaatggcggaaccaaacttccggccggagagtattacttgctcgcatatgccggaaacaaaggcaagtcaagccaggttttgaccgaagaacctttcactgttgaataagaaaaagccctgccgaatcggcagggctttttaaagatcagtcagcaaacgcctcctgcaataatcgatacgatcggagcttatcttcaaaatgatgtgtgatggtcaccaccatgatttcctctgtttcatacgctttactcaaagctagcagccgctccttaacctgttctttcgtaccgacaatcattcgatttcgattatcagcaattcgtctctgttcataaggagaatacgtatttttccgaacagcttcatacgaaggaactccctctaaaggaataccctgctctcccgccaaaagtgtaaaatcaagcacagccccaagctcctctgccttctcctccgtgtcagcacaaagaacaaaaacagcaactgccgctcgaggcgtatctcctaacacagacggtttgaatcgtctcttatactgtctgacagtaccctctccgccctctccattgataaaatgggcaaacatatagccagcgccagattcagctgcgagcagcgcgctttctccagatgagccgagcagccacacatccggagccgttgaaatatgcggcgcagccgtcagattcggaaaacggtgtttatcatccgccaaatcatgcaaatacatggtcagctccttgatttgctgcgtatactgatcagcattgcgcttaccgccgtcattcagcgcccatgatgcaatcggcattccccccggtgctctgccaagccccaggtcaattcttcctggtgtcagcccctccagaacacgaaagttttcagctactttataagcactgtaatgcggcagcatgactcctcctgatccaacacggattcgctttgttttcgccgctatatgactgattagcacctcaggactggaccctgccagccgttttgaaaagtgatgctcagaaacccaaaatctcttatatccaaggtcctcagcagcttgggcaagcgcaacggtttgctgtaaggccgtttctgcattgctgccctctgatactggagattgatctaatatacttaatgaaaccatccctaccacctcatcctcatcgtatcactgatcttctactttttctccaaagccgctcacattgcttatcagtgtcccctatcattcgccatttatttgtgaaagcctgtccctatttgtcggaatatgttacacgtgaaacataaaaacccctccagacggagaggtttgctttagtttttattaaagcccttttctttcacgtagtcatttaaatacgtacgcggcttttgcttcataaagttcagtatttgatcggaccacgtttcttcccgctgcccgtttgttctttctctatagtaatcagaaatggttttgtcatacgtattcatagtatgacggaaatcgtctgtgttcacattatacgtattctcatgataaacggcctgctttggcaatctcggttttttgccggaaaggttcgcaggatggcctactgccagtccgaaaagcgggagcacatggtcaggcgtttgcagcacctctgtcaccttgtccagttcattccgaatgccgccgatatagcaaatgccaagccccatggattcagcggcaatgctcatattttgcgctgccagcgccgcatcaatcaagctaaccataaacatttctgtattctcgagcagctcagaaatatgttcacctttttcctcagccagtttttgatggcggtacaaatccgcacaaaatacaaaaaagtgtccgttcttctcaacgtaaggctgattcccagcaagcacggacagctcacgttttttctcaggatcagaaaccccgataatcgaatatgcctgcacatagctggatgtagacgcagcctgcgcacttttcactaatgtatcaatttcttcagctgtcaaaagctgatcagtaaaagaccggattgaccgatgattcaaaatggtttcgattgtgttattcatcacaaaaacctccttatcactttttatcatatccgaaaaaaagtgatctcaaaagcgaaatgctctgcacaaaaaaagacagcctctgtaaaggctgtctgcatattaagaattaaaaagataacttctgtatttcgtcagctgcacacttgcattatatacaatcccaaatccgattaacgtggaaagtgtcgagcttcccccatagctgacaaacagcaacggaatcccggtaacaggcataatgccgatgttcattccgatattctggaatgtgtggatcacaattaacgccgtatagccaacgcaaaagaaagaagcgaaacggttaaacggatgtattttgtctatcagaacaacaagcctgtagattaaaaagaagaacatgatgacaacaattgcacagcctataaagccaaatgactcacctattatagaaaagataaagtcagtcgtactctctggaacataaaccttcaaattagaaataccattacctaaaataccaccagatcctattgccatgatggcctggtcaacttgccagctgtcatttgaatcttcctgtgtctcatttgaagcagacacccaagaagtgacccgcttaatttgataatcctgtattccaactgatttagcaacgtcaggaaagtttatcattactaataaaattaatgaaatgagtaagatacctgaaccagctatgatcgcaatcaatttccaatttatacctgacataaaaaccattacaagaacgataaacatacatattcccgcagtcccagcatcctgcatcaagataagacctacaggaataactgcgacacccgcaatctttaataacaagtggatatcatccctaagcgtccgaactcctttaggattagcttttccaataactgaagcaagcatcataatcaaaccaaccttcataaactctgacggctgtattgttattctaccgatcctaaaccaactttttgcccctttaataacaggtgcaatagactcgggactgattttaagaataatcaaagataaaataccaatgataaaaatatataaacttaacttttcaagctgttctaaatcaaagtacaaaagaactgtaatggcaacagcccccaaaaaataaaacacaatttgctgaatccaatccgtgttcccatactgcccaaactgaccggcagcataaattgatactacgcttataataaaaaacacaccaaatataaaaatcaaatccccctggtaaaaggggctttgctgtttcttatatcgactcattctatcccgccttacattttcatcggaaaatcactaatgtttattatacatgaaccacgttcaagatgacacgtgaagctcgcttccttttatgttttttcagcatttgcggcgctttttcagctacacgaaatatgacgtatcataaaccgaaatgtttcgattgacacaaaacttttcaaatgaaaaaaacgccataccaaaagaatttgttaaaaaacgaatgcgataatgtgttatattcccaaataatgtgatacctcataagaaacagctaaaaattcagagccccatgcccatacattctcctagcacattaaacgaaaaaataagacgatagatccagtccatttctgcaaaaacacgtatcaatttctggaaaacatggtataataattgtaacagaatattcaaaaaacaatcacaaaacagacacaactcagttcctctatttcatttttgtaaacgttatcacaaaatgaaaggagacgggtatgatggacatgttttttgcttacttattggttgccagcgcaacgcctctctttatttggcttgataacaaaaaagtcgcactctcagctattccgccaatcattttaatgtgggtattcttcttcttttacgcaacagaaagcctttctccacttggacacactctcatgattatcttgtttgccgttaacgtcattgtcgctcatatcgccgcatttatcatttacggccttccgtatcttcgcagaaagcgaagcagctgaagacagcaaaaaaccctcttccaatgaagagggtttttgtattattcgttatggcctgaatgctctgagtgttcagcgcctccaggaggatttccgtccatatggtcaccatggtgatagtgagccgcgaaaatccagatggatccaagtacgataacgatcgcgccaaagaatccgaacagcgtgtttccgacttggatcgtgccgttttcgctctctgtcatatgcatgaacatgagaagctgcagcgccgcctgaatgaaggcgaagccgaagataatccaaagttttgctgatgagctcaggtcagtatacactgcaacccatagagccagcagggtcaaaacgatagacaggataaaacctacaatgtgtttccatggaaagtgactgtgttcagcagatttgtttgccattttacagacccccaatcccatgagatagacacctgtaaagatgaaaatccatacaacatctaagaagtgccagtacaagcttgagataaagattttagatgaagtttgcggagttaagccgcgtttcttcaactgaatcagaattcctgtgatccagaaaatcccgattgttacgtgagttccgtgagttccaagtaaaacaaagaatccagaccagaacgcacttgtactgagagccgctccttcatgtacatagtgaacaaactcgttgatctcgcatccgacgaagccggcaccgagaagaagagtgataattgtccaaatgactacgccttttaaacttccgcggcgcatttcatgaacagcgatcccgcaggtaaagctgctgatcagcagcaagaacgtcataatcattaccagattgacttcaaatagttcgtctggcaagacacctccagctgttctgtttttaagaacgaagaaggttgcaaatagtgttgagaacaacacaatttctgcccctaaaaagatccaaaacccgagaatattaagtctgccggtttcagattgatattccataggcgcgttagaattgccgtgttctgcatgttccataactcacgcctccttattcggaaatctttctttccgtctcttttatttcatcaacactaatgtagtagccgttgtcgtattcgaatgaacgcagaaccatgcagagcaggactccgatcaatccgactacgcccatccagtaccattcaaagacaagtccaaagcctgcaagaccgaaggcaacagacataaagaacggtctgcctgagttgcttggcatatggattttcttgaatttgctttcagggtataattcagttttttcttctttcatatgcaggaatgcatcttgagatttgacttcaggaagcaccgcaaagttgtaatgcggcggaatcgcagaagaagtcgcccaatcaagcgtacgtcccacaccccatgaatctccgctgatttcacgagtagagtaacggaagctgtagtagatgttatagcaaaggattaagaatcctacacccatcatgaaagctccgactgttgagataaagttcaatgttgtccagccgtcattcggtccgtatgtgtaaatacggcgaggcatgccttgaagccccaagaaatattgcgggaagaaacaaatattgaacccgatcataaagatccagaagaaccattttccgattctttcgttcagcttgtggccgaacatttttggataccagaaaataaatccggcgaaacaagcaaatacagtacccgcgatcagcacatagtggaagtgagatacaaggaagtacgtattatggtattgataatccgctgctgccatcgcaagcataacccctgtaaccccgccgataacgaagttaggaatgaacgcaagcgcccacagcataggtgttgtaaagctgattcggcctttatacattgtaaagagccagttaaagattttaaccccggttgggattgagattgccattgtcgtaattgagaagaatgagttaacggacgcactgttccccattgtgaagaagtggtgagtccaaactaagaaactcaatacagagatggcgataatagaaccaaccatcgctttgtaaccaaacaattgttttcttgcaaagcttgagatgatttctgagaaaataccaaacgccggaagaataacgatatatacttcaggatgtccccaaatccagaacaagttagcccaaagcatcggcataccgcctgcttccaatgtgaaaaagtgagcgccgaacaaacgatcaaatgataaaagtgctaatgctactgtaagtacagggaaagcaaacacgataataaccattgtgatcagtgttgtccatgtgaacattggcatacgcattaatgtcatgccttttgttctcatttttaagattgttaccataaagttgatccctgtcatcagggtaccgataccggcaatctgaagtccgaggaggtagtagttctcacccggcccagggctcatgtcgttacttgcaagcggcatataactcgtccagcctgcgttcggagaacctccgataacgaaagaaatattgaaaagcatcgcccctacaaagaacgtccagaagctcaggttgttcaagtaagggaacgcaacgtcgcgggcaccgatttgaagaggcacaacaacgttaataagaccgattaagaacggcatcgccatgaagatgatcatgattgtaccgtgagttgtaaaaatttcattatagtggtttgagtctaaaaaactgttattcggaagcgctagctgggcacgcatcatcagaccgtcgacaccgccgcggaataacataattacagcagatataatgtacatgattccgagttttttatggtcaacagtagttatccattcagaccacagccatttccactttttgaagtaagtcagtacaaaaataatggcaatggttgaaagcgcaatggaaacttgtgcgcccagaattaatgggtcaccagttacgaaaaattcgtcccatttgaatttcatgcaggcttcctcctttcctgatcaatatcattcttctgtatcatcagacttcttaaattcgtttttctttacgttttcaaacggatctgttttagagtgcggtgaaacggcttgatagccaaggcgtttgcgcgcctccatcgcgtactcagcgtcttgtccgtgatcaacgtatttcaagtgagtagaagagaacgttaattcgtccacattttcaggaagcatcaattcatcatacttctcttttgtcagcttaggagcctcgttctgagtctttttcacccagctgttaaagtctttttctgtaactgcattcacatcaaactcttggtctgcaaaatgttcacctgtgaagttcgcgttgcggccttcgtaagtacccactttgtcagcctgtaagtattgatccatcagcattcctgccatcgcatatttttgccctccaagctgaggaatccatagcgaagccattgaatctgcagatgagattttgaacaagatcgggcggtcgacaggaatgtttaagtagttgaccgtttcaatatcctgttcagggtagctgaatacccatttccagtctaccgaagtagcataaacaacaagaggctctttatcttttgttgcttcaggagctttttctaacgaatatatcgtctgtactgttggcacagaaagtgcaatgacgattaaaattgggatcactgtccagactacttctaaaaacgtgttaccgtgaatttctgggttataagatccattatctttgcctttacggtcgcggtattttactaaaataatggtaaatagaacaaagacgaccccgacgataaacagcataaatccgatagataacaggattaaatcactttgctgttcagctacaggtcctttcggatctagtactgaagcattgctgcatcccccaaggacgaaaaccacagttaacagcgctaatacaagcaacggttttaatgctctgaacaagaagatcaccatccttcctattgatgtaataaatctgaagtgcatacttcctcaaaatcttttctctactttgttatgctatcaaaaacttcacttattagctttatttttttataaacttcatcccattttcgcttaaatgtcataaaatcgacaaaaattgctccaactttattcacatctatcgcttaagatgaaaagtttctagttatttccgcatataagtaaagaaaagatgatgaagaactaattctgacaaataaaggtttaccacaataaaaaacttaggtcaatcaaaaatttcattttgttaaactttctagataggaattattttttccttgtctagcatcttttcacacggttaccattttaacgcatcaaatattgaaagaaaaggcgcaatgaagagccaatatgctctgaattgtccgtattttttaatgagagcatccagttgtttatcttatacaaaaaagaggaatgatataagcaaataaataaaaaataggatgtgttgcatgatgagttttcttatttcacttatcgtcgctattattatcggatggcttggaagcctgtttgtaaaaggagatatgcccggaggaattatcgggtctatgatcgcaggtcttattggcgcctggatcggacacgggctgcttggaacatgggggccgcacctagccggatttgccattattccagcggtaatcggtgcagccattgttgtctttctagtaagcctgttaaccagaaaaagaggataaaagcagcagcacccgaagcgtcagcgctttgggtgtttgttttgccataaaaatcgaaaaagcctcaaccctagcggttgaggcttttgactggtttggcgcccaactggtcgataaaccttctgaaggcctgttttccttctgttgtctgtttaaacacaccggcgtgttcaaggatgcgcgcgaatacatgtcccagctcttcttttatgactagatctgcattctcttttgttatggttcttttttccatcatccgattagcccactcactatgttttgccgtgagcggattttgttctaaagctgttttcggatcagcagagcatagcgccgctgccgtttctttcatttcctcctgtaagcggcccggcaatatcgccaatcccatgacctcaatcaggccgatattttcttttttaatatggtgaacttccttatggggatgaaatatccctaatggatgctcctcatccgtccggttgttcctcagtacgatatcgagttcatacaagcctcccctgcgccgtgcaatcggtgtgaccgtattatggggcgtatcgcctgtataggcggcaatgccggctttttcatcggaatacgtctgccacgtgcggaagatatggtcagcagcttcggcgacatgacccggttcgtctccttggagcctgagcacagacatcggccacttcactaagcccagcgacacgccgggataatcgtttaattcataaacgtcttccgcttctgcacgtgccattggaaaatcatgcgcgccgccttggaaatgatcatggcttaggatgctgccgccgacaatcggcagatccgcgtttgaaccgataaaataatgcggatattggccaagaaatgacagcagcctttcaaatgtttttttgctgatctccatcggttcatgttcaccttttaagacaatgcagtgctccggataatagacatatggcgagaattgcaggaaccattgttcgtcctcaaggatgaccggaatgattctgtgattttgccgggctggatgattcacgcttccctcgaagccgacattttctttacacagcaaacacatcggataatttgtctgttcctgctcttttgcagccgcaatcgctttcgggtccttttcaggctttgataggttaatggtcatttccagctcgccatattcggtcggcaccgtccaatgaacatttttggcgattctgtcagtccgtatataatagacatcctctgaatattgatagaattcctttgtcgcctgttttgggccgtataatgcttttgtctcttcaaatttgcgaatgacctcggacggggcaggcacaaaacagcccatcagctttgcgctgagcaggtcacggtacgtatctgtatccgcttccattcggccggtttcggcagcccatttatagatgggagctagcaagtccggcaggctttgtgactgcttgatgctggtgctggagttcggctcgggatgtgtgatgcccagcgcttcataaagacggtttctcgtatattcccgatcccagatcgaaatcaattttcgttccaggccatactcaagcagctgttccagatgttcaataatactcatatgtcactccccctttagttctctcgctccctctccgatatccgcgacataaaagtccgctcggagccctgttttttcttgatatctgtctccaaccttctgaataaaatcatcaacgaactcatcttttacaatgctgatggtgcagccgccaaagcctgctcccgtcattcttgatcctattacaccttcgtgatcccatgccgcaaacacaagctcatcaagttcagggcatgttacttcatagtcatccttcaatgagaggtgggattccttcattaactgcccaatttcatctatattgttctctttgaacatatgggccgtcttaatagcacgatgattttcgtatacagcgtgctttgcccggcgtctgttcgtttcattttggatcaggctggaatgcgcatcgaaatcagaaggcttgatgtcgcccagtgcggcaatatcgaggccttttttcagatcaagcaatgcatcattgcattcttggcgtctcgtattatagctcgagtcagccaatgtcctttttttgttcgtgttcgcgatgaccagcgcgaggcctgagacattgagtttgctatattcatagtcaagcgtgtcacagttcagcagcatcgcatgatgttttttccccattccaattgcaaattggtccataattccgcaattgacgccgataaaatcgttttccgcatgctgcgccattttcacaagctcaagcgcatctacttcaggatgaaaatagctttggagcacgacccccatcagcagttcaatagaagcggaagacgacagccccgccccgtttggaatattccctgaaaatacaatgtcaaagccatagggaactgcatatcccctctgttgaaattcataaatcacgccttttgggtagttcgcccagtcgtcttctttttgatagcgaatgtcgtcaaggctgcattccttgatcccctcgtctttaaagttgtctgaatacatccgaacaagcccgtcttttctttctgcaacagcagcatatgtacccattgtcagcgcgcacggaaagacatgcccgccgttatagtctgtatgttctccaatcagattcactcttccaggtgcgaaaaaaaaccgtaatccctctttttctccgaatacacttgcaaatatcccctttagctcttcccgcatgtgcaatcacctttctggtttttattttttattccccttatttctccatagaaaacggcagatcatatgctgcagtcctctcataccccttcttcttttgtttttttaaagacgagccatttgctcgcaacatagttgacgacaacaatgaccgcgttgtcgagtattttggccaaggtttcatttgtattgaactggccgacaagaatgatcatcatgcctaaatctatgccgagagacaggacccgaacgctgaaaaaagcagtgagctctttcagcaggctctgcagatcatgtgttttttgctgaaacacatataatttatttgttatgtaagcaaacagcacggacaaaatccaagcggcgacagtggcggctttgtaatccacattcatgatctctaccaatatataaaagctggcgatattcacaatggttgtgaaaacccccataatgatatacataattatttctctatacttcactgatgttcctcgctttctgaaaaacttttcaaaattcttggcctctcgtgctctctgtctaaagtaaaaaataccgaaagtgcgtctaaaaagctgcggaaggtggctggctggcccaatacatatgattgtttgatgattccgtcgaggactgcacatattattttagccgtatattcaggatcaatacaggcgtcaatcagctttctctccttcagccacttaatatataacacattttcttccacccacaattcgtacagccggacataggccttgcatttctttaagactttatatgtcggcatgttcatggcaaacgaggtgatgtcccacgacggcttatttatgtaataggaataaagcagttctgcagcgtgttttgcagcctcgtccaatgtcagcgatttcactgactcccgctccatttgatcaagataccctataatgatcttttttttcatctgacgtttttcgagaaggtacagcagaaaatcgtccttgctgacaaaatgaacataaaatgctcctttgctgtacccggcggctctgctgatatcttctacagaaaccggatcatacgctcggtcaatcaacaaattcacgccagcgtctataaaactttcaaatgttgcttctcttttaatttgaaatttgttttttttcatatttttctcctggcggtaatgattacccttatcttacaccggatcaatctttagcggtatttatttctttgaacggttatgctattcggtttcccaggggtcatttttaataggctaaatgatttattttcatttacatactatccagtcagtatttaattgtttattattataaataaggtccattggttatattagtcatttttttagggaataggtaggtggtttttccttcagtttgtgaacaccgagcaactatgtgtgaaatttgttgtactcgcctcatcatcgcgctggcttgtcttttattgcccgcatgttgcaggaaaacattttatacaattggaggttactatgaaaactcatgttaaaaaagatttggacaaaggttggcatatgttaattcaagaagctagatccattggattaggcattcatgatgtgaggcagtttttagaatctgagacagcatcgagaaagaaaaaccacaaaaaaaccgtccggcaagactagtccgaacaggcggatctatttacctctggcttttctatcacctgatctgagttttcaccatatcctctattcaaaagcaaatcgctgcgctgagcttgaggacaaacggtgtgtcagctaactacgacagacagccggtgatgcgatcacctcttggcacatgcattgtcataaagaggtgatgcgaacatgataaccgtgctctggtaaacagcagctttgctgagaacaagctgcattcggtgaggttttgaaagcaaactcgtttatacacggccgagcttgaaaaccttcgcctgtctttagaccactgtgttcacctcttcacgacttccttcttttttcatcctccagatattgttcaacgcataaatcggactttcagtacatacctattggtgtacctttttgcttacgtttagcgaataaaaggaggaaagccatgtacaaagctgattataaacagattgctgcaacgccgtcttttcaagcttttttaaagcagaaacgcgcttttattgttccttctgcgattttcttttttgtcttttatttttcactccctgttttgacatcttatttcacctttttgaatgcaccggccattggagctgtttcatgggcttggctgttcgccatcgcccaattcgctatgacctggatactgagtactgtgtattcccggagagccgctcatttcgatcagtatgtaagcgctttaaaagagggtctgaagggtgaacagacatgaatatgactgcttttttattatttttggcgattgttggcctgacgcttattatcacgtattttgccgcgaagcggacgaaaacgacgagtgagttttatacggcgggcggcgggctcaccggcgttcagaatggactggcaattgccggtgactacatgtctgccgcctcgtttctcgggattgccggaatgattgcgttatatggatttgatggcttcttttacagcatcggttttctggtggcttatctcgttgtcttgtacatcgtggcggagccgcttcggaatcttggaaagtacacgatggcagacatgattgccgctcgctttaaagaaaagaaaatccgcggtgtcgcggctctcaataccattgccatctctactttttatatgatcgcccagctcgtgggggcgggcgcgctgatcaaactgcttctagggcttgattatactatggctgtcctcatcgtcggagtgctgatgaccatttatgtcgtgtttggcggcatgatcgcgacaagctgggttcaaattattaaagccgttttgctgatggccggcacactcgtgatttcgattatcgtgttttcgaaattcggctttagcctcaataccatgtttgaacagatgaaaacggctactccgctgggcgctgattttttgaaccccggaaataaatacaaggtgccgcttgagaccttgtcgttaaacttggcactcgtgctgggaaccgccgggcttccgcatatattgatccggttttataccgttaaggatgccaagacggcccgtacatccgttgtgtcagcgacatggattatcggtgtgttttacattatgacggtatttctcggctttggtgccgcggcatttgtcggttttgacgcgattacggcggctgatcaagcgggaaatatggcggctccgcttttagcaaaagcgctcggaggagactttctgttcgcgtttgtatcagccatcgcctttgccaccattttggctgtcgtgacagggttggtgctgtctgccgcctcagcatttgcccatgatatttacagccagatcatcagaaagggagaagcaactgaaaaagaacaaatgaaagcggccagatgggcttctgtcgccgtgtcagtgctctcgattctccttgcgatttttgcacaatccttaaatgtggcgttccttgttgcactcgcgtttgcggtagccgccagcgcaaaccttccgctgattgtgtttacagtcttctggaaacgattcaatgcctcaggcgctttatcgggcagcctgacaggcctgatcagcgcgcttgtgctggtatcgatgagccctagtgtgtgggacccggctggaggtgctatttttaccggtgatccgctcattccgctgtctaatccaggaattatttccatcccgctcggctttctcggcgcgtggctcggaacggtgctgtcgtctgataaaacaattgatgaagatacgtttgcagaaattcaggtgaaggcgcatactggcgtccatatggaacaggaataaaaaaagctctctttatagagagctttttccttgtcttttcttctgttcttcagaaatcgctttttcaaatacatccttgccggcagcacctggaattacagtgtcgccaataataaaggttggaacggctgtgatgtcagcctcttcataggcgtgcttcaaggcttggcgctgcacgtcctgatatgttcttatttccagtgctgatttgaatgatgcaccgtctaatcccacttcctcggcgagcttcgtcaagatgtcaatgtcgccgatattttggccctcctggaaaaacgcctgaaagacacgggtgttgtattcatgtcctttatggtattccttcgcaaaatggaagccttcaaacgcgaggtctgtatacggatggggcgagacgtttggaaaattgatctcgacccctaatttctccgccattggctgaattgatgtctgccacatgtactgtttggaagggtcattgaccggatcaagctgaggagatgggcttggacgcagttcaaacggcatccactcgacttcaacatcctttccttttatcgcttcttcaaaagcggcttttccaacgaaacaaaatgggcagacgtaatctgaataaactttaatgtgtactgtcatgataatctcctttcgtataaattgattttaaactgtaacaattaaagttacaactgttttttaaataaagaagccgataaggcttcttttatgattccagcaaacgctgggcaatatattctccttttttgcagccgcctgggcatgcatataaagcagaaccgattgtttgtgtatattcgtttaacgcatcctttgctgaaagagccttcagcatcgggataaactgattgtcgggatttttttgaaaactgataaacagaagacctgcatccatatagccggttttcggatcaagtccttctgtgtaagagaaagctcttcgcaaaatttgttttccagtagatttcgctagactgacgtgtgaattagacggaatttgattcagcttcacgggatctgtttcctttttctgtccgaaaggcgcccccgagctttttctgcggccgaaggtatcctcttggtccttgagggaagagcggtcccatatctcaaggaacattttgattttccgaaaagccatataggtgccgcccgtcatccagtcaggctcaccagactgaatccacacgatcgagttcatcaagctgtcatcctccgtgctctggttgcctgttccatctttgaacccgaagaggttgcgcggtgtttcaccattttttcctccgcttaaaaagcctttgttcacaaagcggacctcacaagtgccgaccgcttgatttagcaggttacgcagcgcgtgaaacgccacttgctcgtcgtctgcacacacttgaatgcagatgtccccgcctccctgcttttcatccaggttgtcattgggcatcgctggaagagcggctaggtgcttcggttttttgcttttcagcccgaaacggtcctttccgtctttttcaaaaaagccaggcccaaatccgaatgtgaccgttaagttggaaggggataaatcagcagactcacctgtatcctgcggcggcagatattgatttctctgctccgctgacattttcttgccagacgtcagcatctgtgtgagacttgtccagtttctaaataacgtaatgatgtcgcttttgtcttttgctgttacatccagtgcagcaaaatagacatacgtctgatgggcagttgtgattccggcctgatgctttccgtaaaacggaacaatctgctcctcctctttttcatcctttttcgatggcttagccgcagtctgaacaagtggagcgagaccgccgagtccgctggcaccgatcgcaacggctgcccccgccattgcccccattttaaaatgtcccgtctgtgaatttgttctgactttttttgttcatcgctcatgctgttacaaaactccttttatagcacattcgcaatcttcgacatggtttcagaaagagtcgtcagctttgtgctcagctctctgatttgcttttcacttaatttatcataagacgtataggactgatcatttgttttgtattttgccattaaaacttcaaattcgctgaactccgtatccagtttttccgtcaagtcggagtgatcttttacaagcgcgcttttcactgtttgataaacggcttcggagccttccacatttgccataaggtcgactaaatcgattcgtgagtagcgctcttcttctcccgtgattttcgaaatcccggcttcgttcagaagctccatcgcgcctgctacaatttgttcaggtgttaatttcagtgattgaattgaaccgtcaagctcttttacatccttgagaagctggtcagctgttgccttttccccggaaatatcttgatccttccaaatggccttctcaagcttatggaagcctgtccatttgtctccttcttcaacatcgttttctcgagcatcaattttcggatcaagatctccgaggctttcagcgatcggttcgattcgctcgtaataaacacgcgctttcgcatataacgttttggacttttcgatatcgccggatttcacagcacccgtaaatgcttcagtcgctttgacaagctggtcactctgctctttgacatagcctttatactcatccgctgcttttgccagctgatcgctagcctttttgccgctcttcttcgcttctgtcaggtcttctaaggacgctttcagtgactcggattctgtcttgatttttgctgtatccggtttgtctttttgcgcttctgtgtagattggctgaagatgcttttcgatttctgtatattcgaatggatagtcgctgcgaatatcgttttcaaaggaaagccagtagctgtttaactctttccccttcttttcaatctctttttggtctcctttttccgctgagtcattcagcttagaaatgatggtttccattttatttacggatgcggtgatttctttagtgatcccgcttttttcagatgaagctttttctttagttgaagatgtgtcgttggctccgcagcctgcgcacagcgcaaggatgcatccggctgatacagcgatttttgtgaaattcattttgtcagttcctttccgtttgtaaaatgttttgccgcttctgaaacaagcgcaatcagtaaaaagaggaaaatcaacatttgcggaatcgtgctgtacacagacggataaattcctagcaccgatacagacggcagccagctttctgcatcagacggaagaatgcccgccagttgaaggctgtgaacgccggttccgagaaatttcacgcacatatacaggacaaccgccattgatagaagaaaaaacggcttcaatggaatgcgcattccgagcttgatcatcagaacaccgacgatgacgagaacgataagccctgcggcagttccgccgatcagttcagtgagcgggagcttcccgacaagcccgatgaaaaagatgaccgtttcgagaccttctcttacaactgccagaaatgcaatgagcgcaaaggaaagcaggcttcgtttttttagtgcctgtgacttctggatattgattttttctctccatttatccattgaggcgtttctgtgcaaccacaccccgacatacaaaagcatgacagcggacagtacgccggtgacgccgccaagcaagaaattgttttctccgaatacactggaggagaacagaaccgtgacaccgatgccggctgctaaggaaacagccatgccggcagacgctccgccccagatccatgccgaggagcgcgtgacccgcgctttttttgtcatggttaatagtgctccgatgacaaggagggcctccatcccttcacgaatcgggatcagcgccgcatcccaccagctgtagctgcttgaagcgatcggctcgagcaattgaatcatttcgtcaatttgctttgataccttttcgggatggctgccgatctccgccttcatcagtgccagattttcctccgatgtcgtataggcttctttcgattgggacacgacgtctccctctacggcgagccaggatgtaactaaattgtcgattgcggatgacgcttcatccaattgttttttttctatgaactgttttgtgtctttcaagctttgtatataggctgttaaggacgcccttgattgacctgaggatgtctttttcagcacgacagcctgctgataggtttctaaatgagacgcaagctcttcaagctgtgttttgagcttgcctgcgtcttgattgataaaagaaagagaaatcatcgcgatattcgcgtccatttcactgtgagaagaaaggttttctttcttaatagaaggttcttcttttttccacttcgctttgaaggtttcaaacgtttgttgtgccgaatccatatccccgtcttttacggatttgatcatttgcttgtttaattgaattaatgcggcgatcggatcatcttccgcatgtgccgcagaaccgaaaaccatcaacaagctgaatagaataagtgccagcccccgagccatcatgttcctcctataattgaaaatgattatcattgtataacataatcatagccagttcttgtcctttgtcaattaaaatttgaaggtctgaaaaccttgatggacagcaaaaaagctgtccttttacagaacagccttttgaaggaagatgaacgattatctttctgttttatatgtttgaatttcctcacgaaacttgcgtgcagcactctcaggatcttccgcctgactgatggcgctgatcatactgacgccatcggcccccgcttggataacaggtgcggcattatctattgtgatgccaccgatgccgacaattggaatgctgatgccttggcggcgcactgcttcaataagagataccccttgtaccgctctcgtatcttttttcgtttcagtcggatagatcggcccaagcccgacataatcggctccgtcttcttcagcttgcttcacctcagacatcgtatgggcagaaacgccgagaatcatatcacctatggcagctcttacctctttcgcatttgcgtcttcctggccgatgtggataccgtcagctttcagcttcagagccaattccacatcatcattgacaatgaacggaataccagcttcacggcaagctgcctgcgctttttcagcaaattcaatccgagcctctcctgtcagcgcatccccgcctttttcacggaactggtacagggtggcaccgccttttaacgctttttgtacaactgtaacaggatcggctttcgtattgtttgaccccataatgaagtatacagataataactctttcatcatttcccgagaaatacgagtcatgagacagtcaccctttctatagccgcccattcttggacgtcttgttcagtaacagttgaaagcttgttcagcaattcaatctgaaagcttccagggcctttgtcagccgtctgctgtgcggcaagctgagcggcgaccccatacgaagtaatggccgcaatagcagcaaacaatggattttcttccacagcgcaaaacgcaccgacgacggaagtcagcaggcaaccggcgcctgtcacttttgtcagcagcttgtggccgttatgaagggtgtatacatgtgatgtgtcggcaatgacatcgacttcaccagtaatcgcaatgaccgtgtttagcttttgtgccgcttgctgagccagccggatgatgtcgcctccgccttcacccgcatcaacacctttgatcagccaatccgtcacaccgacggtatgggcaatttccgccgcatttcctctgattgcagcaaggcgaacctcacgaatgatgtcacgtgccgattcagttcggaacggtgttgctccggcaccgacaggatcaagaatgacgggaacgccatgttcattggctgatttccccgcgatgatcatcgcttcgactgactccttgctcagcgttccgatatttaaaacgagtgcacccgcaatcttcgccatatcggcgacctcttcttttgcgtacgccattacgggcgatgcgccgagcgcgagcaggccgtttgctgtgaaattcgttacgacattgttggttatgctatgcaccagtgggctgtgccggcggacagcagtaagacattttgctgctgattgtgcatccatgtttgcatcatcctttactatcttttttcgggtcccataaatacgatttcgtatgttcgagccaagctctggcggcaaacgacaagtaccggtcctttctccaaataatggcgaggtgccaagggatgaccggatcgacaagcggaatgactttcactttttccgggtcaaggccgcggcagatccgttccggcaaaagcccgatcccaaggtttgctgataccatctcactgataaaatcccattgtgatgtttcataaatgatatggggccggaacccagccttgatacattccgtcataattcggttgtgcaggacaaaatcctctctgaagaaaataaaaggctcgtccttcaactcacgcagctgacattctttctcatcagccagccggtgggaagggtgaacgacaagcattaaggtttcttttacgattgtaaacgaatgaaagatatcttcgtttgcgggaaggaccacaacgccgatatcaagagagccgtccccgacaccttcttggacttttatagaaccgtcttcgactagctgaaaggtgacattcggatagttttcacggaaatcgccgagcactctggggaaaaaccccgatccgatcatcggcggcagtccaatccgtacgtgccctttcttgacttccataatatcatttaattctgacgtcaggttttgaaatgatttaatgatttcctgcgcctgcacatacatgctatgaccggcatcagtcagttccacctgcctgccgtttcggtaaaacagttcaattccgagctcttcttctaaatttttgatcatttttgatatcgtcggctgagatacataaagggattgggaagccttcgtaaaactttttaaacgggcgacttccaagaaatatgttaaatggcggatatccatgtgcttcaccctttctatagacaaaaggaatacttcttattcttaatatatattttacctatagagagaccttatgtacaataagtatataagggaggcatcaatatgaaaaaactgttgctaaccgttattcaaatcgctctgttatttatatttgctcggctgattaattgggtgacagcccttcttcatataaatattcccggcagtataatagggattgtgattcttttcacattattgcactttaacattatcaagcttgaatggatcgagcttggtgcagcgtggcttctcggggagctgcttttattttttatcccgtctgccgtcggagtgattgaatacggagacattatgtcgaaatttggtgtcagcattctgcttgttgtcatcatcagcacgtttgtcgtgatggtgtctacaggaacgcttacacaactcattgcaaagagaaaggagaaaaagcatacgtgttcatcggaattgtaagtttgtttttaacggttttggtgtatttaggagcaaaaaaggtatatcaacgctttccgcgtgtttatacgtcgccgctattggtgacgcccgctgtgttagtcggtctgctgctgctggtgaatgtcccgtacgagtcctataatctcggcggcggattgctgaccgatatgctacagccggccaccgtggcattcgcgatcccgctatataaatatttccctgttttaaagaaatacgcagtggaaattattttgaatgtggccgtcggttcatgcatcgcgattatttctaccgctcttattgcgaaatggcttcacctcggcaccggcttaattgacagcctcgtcccgagatcagtgacaacgccgatcgcgatgaacgtatctgaaatgatcggcggaatgcctgccgtcacagccgtgtttgtgattttaaccgctttgctcggcacagtgatcggcccgatggtcatccgctatttccgtattgataacgaaatcgcgcggggcgtgctgctcggcacaagcgcacacggagcgggaacgtcaaaggcatttgagctcagctctgtgtccggcacgatttcaagcgtatcgatgatcttagctgcgattatgacgctttgcgcggcgccgtttttactttcatttatgtaaaaaactgtcctctcgagggcagttttttttatgtgcttccccttattgaaaagctcgcaaattacaatataatgtaatttgtggataccaaaggaggcaccctgatgcacaacttgcaggtgaggcggcattacgccgcgttaaaaggattttatttgtttgcttttctcggtacgggcagcatgattcccttactcagtatgtatttaacgaaggaacagcatttaagcggatcacaggtcggcttgatcatgtcactgggcccgattgtgatgattttctttcagccgttttggggcatgctcagcgactatacgcaaaaaacgaaaggcctgctggcggtttgcacatcaatcacaggcatcattggattagcctatattgcatttgacagtttccctctgtttattttgattgcggcctgttttgcagcctttcaaagcacgattattccactttcggacagcatttcactaaggtacacacaagaaacaaatggcaactacggcggaatccgcctgtttggttctctcggcttcggtgtcgcggtgtttgccatgggacaggtgacgaaccagctgtaccccattcacgtgatctttatctttggctgtgcctttctatgcattgctgccatattggcttcacaaatgcccggccagcagaaaacaacaacaaaagtcaatatccgcaaaggattccgggagcttatcagcaacaaaactttcctcatctttatgatcatcacctttacgacatttgctccaaacttagcgaacaatacgtatttcagtctttttctggacaaaagcggcgcgtcactttccgctatcggcattttatttttcatcggtgtcatttcagaaattccatttatgagattcgcccaaacatttatagataaaatggggctgctcaacgtcattatgctgtcaggcggagtctcattattcaggtgggcgctctatttcacggcgccttcactatggatcatttatgtgacggtctttcttcagggagtggccatcggtttatttatcccggcggcgcttcaatatgtgaaaaagattaccccaagacacgttgaagcgacagcactgaccatgtacgccgccatcggcaacgggttcggcaactggttctgcacatttgcaggcgggtatatttttgactacgtatcgattttcgcagtctacttgctttttggcattctgagcatagcaggctttggcctgacattatatttaatgaaggctgaaaaaaacaaacatacacttcatcagccggctgttacttttaaaccataatgactataatgaacaaaagaaaggatgtgcgttatgaacgggcaagagcgaaacagcatttcgaaagggttgcaggttgatattgtattgaaagcagatcaaaaaacaggaaaactgacgagagggacagtgaaggatattttgacgaaatcaagctttcatccgcatggcattaaagtccgtcttgaagatggccgcatcggccgcgtccagcagatcatttctacataaaaaaaagctgcccctgaacagggcagctttttcattattttttctgcagaaggaccactttcaggtagttgccttccggaaatgccgaaatcgttttgaaatcctccggcagcgtaaattcctcaatgatggtgtagcgttcgttcgtttctttaaaggcggcatcgataaagcctttgaatttcttcatgccaaaggcgctgctgtttgtagaggcaacaatgacacccttgtcagcagtgatggcgatcgtttccttcagcaggtttttataatccttggccgcgctgaaggtgcgtttttttgtgcgcgcaaaggaaggcggatcgagaataatcagatcaaagcgcaaatccttttttgcagcatatgaaaaatagttaaacacgtccatcactttaatgtcgtgcgcttcgtaatccagcttgttcacgctgaattgctcgatcgttttggccagacttcggtttgccacgtcgacgcttgttgttttctccgctccgccaagcgccgctgccacggagaatgcacccgtataagaaaatgtatttaaaacggttttcccttttgcatagcggtctctgatcgccttgcgcacatgtctctgatccaaaaagatgcccgtcatggcgccttcattcagatccaccgcgtattgaatgccattctcctggatgatgatcgggaactcgccccttctccctttcacgaagtcatcatcttcaacgtattgtccagccgtgtcgaagcgtttcttctcgtaaatcgctttataatcaagatccagctcatccaatgcggaaatcagcatgtctttaaaggtgtaaattcccttgctgtaccattgaatcagcaggtagccgtcataatagtcgatggtgacgccgccgacaccgtcgccctcaccgttgaacaggcggaaagctgttgtatcttgagcctcaaatagtttggcgcgcgcttgggccgcttttgttaatttggtgagaaaaaatgcctggtcaacctgttcatgtttattgcgggtaagcgtccagccgacccctttgttttgcaggccataatagccccgcgcgagaaactcgccgctctcagacacgatatcaacgaggtctccttctttcatgtgccccgcactccctgcgagagcttctttttcaataaggggatagcctttttttattttggcagcgtgtgctttttttagggtgagtagcttcatatatgtcgtcctctttctgtttgctttctcttatcgtaccacaaaacgccaagatgtctgcattgacagaaaggaaaggtttttctacgatagacaaaaagagtttcgaggaggagcagcatgccaaaacgaattgaccatacaggcatcatggtaagagatattaacgcgtccatcacattttatgaagaggtactcggcatgaaattgaaggatcgcatcacacacacgaacggtgtaatcgagcttgcttttctcggctttgaagacggcccggaaacagaaattgaactgattcaaggctacagcagcgagcttcccgctgaaggaaaagtgcaccacattgccctgctgactgatgacatcgcggctgaatatacaaaagcggaaaaaatgaacgcaaaatttatcgacgaggagatcacaacacttccaaacggataccgttatttctatatcgaaggccctgacggtgagtggattgagttctttcagcggtaaaaaaaaagaacgtacattttgtgatgtacgttctttttttatctataccaactgatatacgttgactcatcgcaaatcatagcttcccagcccatacgctcaaccaattcatggatgtttttatctttggctaaaaagacattaatgaatgagtcatatacactcataaacacaaaatccattttctcatcagttaaaacgagctctgctgcggcttcatcaagaaccgtccgcaagttggcctcagttatgtccaaaacgccgcggttttccacaatcggttctgcgtaataaaaccgattggatccgttcgcacctaatacctttaccaaactcggaatatgaaaatttgaaatatgatcctcactgggataatagaggtctccatttatgttttcatgtaacacctcagccaaatcctctctcgcgaactcgtcccttaaagcgcctatcgacgtcattaaagccagcgccagctcagcatgtgtttgaaagccgcaagaagacataaccttcttccaggaaacagccttgcctattcctcttatttcatcatcgtttggataaatatgctcgtaatcattttttctttttgcattctcccatccttcaggcatttggataaaaggagaaaagataagtgcagcagatgagtattcaactggtacttgttgtaagattggtgattcgtcatctaaccatatataatctagcatgcgcacctcctttacatattctaacattctctttcgtttaaaaggagatgatcagccctatgacaggctgatcatctatcacatcacatttttatccccagattcaaccgcactctcttcccgccatttttgatgatcccatattctgaaaaacggatagtagatggcacaggtgatcagcagattcaccagctgcataacggcgcccgacacctttccgcctgtcgccaggtaacctgatatgagcggcggcatcgtccatggcaccgcgattccggccggtcttgccaccagcccggtgctcatgccgatataagtcgcggtaatcgtgaggagcggtgcgatgataaatgggacaataaggagcggattcatgacaatcggcatgccgaaaatgatcggctcgttgatattaaatagcgcagggccgattcctaatcgtccaagctgcttcatttgtttgctccgggagcgcacaagcatcgtcaggacaagcgccaacgtcgccccgcttccgccgacattgatccaaatttgaaaaaactgagtcgtaaaaatactcggcaacgcctcgcccgcttggaaggcaagacggttggcatccatcgcgccgtaccaaatcggcgccatgattccgccaatgatggaagccccgtgaatcccgcacgaccaaagcagcatctgcacaaattcagcgatcaggcttccgccgagactgccgccaaggatggaaagcggtgtcccaagcaggtctcctacgacattgtgcagactctgaaaaggtgtcatttcaatcaaaaggcgcgccagccacacgagaaacacaatgataaagccgggaatcagcgcgacaaacgatttgcttaccgcaggcggcacaccgtctggcattttgaagacgatatttttttgaataatgtaccgatagatttcggttgaaaacaaggcaatcagcatggcgacaaataagcccttgctgccaagtagcgtgatcgggattccgccccctaccatgatggactccgttgagccatccggtgtaaacggcacctcaaacggcgttgccaatagaaatgcggcaattgaaatcgctccggccgaaagggcatcaacaccatagctttccgccagccgataggcgatcccgaaagcggcgatcatcgccataatatcaaacgaagcattgacgggatatccgagcttatcagcccactccttcccaaacacactcgccatgaaatcagcataccccggaatcggcaggctcgttaaaatcaagaagacagacccgataataatcagcggcatggtcaggataattccgtcacgcaaagcgctgaggtgccgctgtccggcaattttcccggcgacaggcattattttttcttccattacccgagtgaatgcgctcatcttaaaagcccccttttcacattgctttgtgaacaacctccgcaatgttttctttatcttattttgaaaacgtttacaaattcatttggaaaatttcctcttcctgcggaaaaaatctgcattttgccaaacaatcctgtctatgaaaaattttttccttctaactattaatctctcttttttctccgatatatatatcaaacatcatagaaaaaggagatgaatcatgaaaaacatgtcttgcaaacttgttgtatcagtcactctgtttttcagttttctcgccataggccctctcgctcatgcgcaaaacagcagcgagaaagaggttattgtggtttataaaaacaaggccggaaaggaaaccatcctggatagtgatgctgatgttgaacagcagtataagcatcttcccgcggtagcggtcacagcagaccaggagacagtaaaagaattaaagcaggatcctgatattttgtatgtagaaaacaacgtatcatttaccgcagcagacagcacggatttcaaagtgctgtcagacggcactgacacctctgacaactttgagcaatggaaccttgagcccattcaggtgaaacaggcttggaaggcaggactgacaggaaaaaatatcaaaattgccgtcattgacagcgggatctccccccacgatgacctgtcgattgccggcgggtattcagctgtcagttatacctcttcttacaaagatgataacggccacggaacacatgtcgcagggattatcggagccaagcataacggctacggaattgacggcatcgcaccggaagcacaaatatacgcggttaaagcgcttgatcagaacggctcggggatcttcaaagtcttctccaaggaattgactggtcgatcgcaaacgggatggacatcgtcaatatgagccttggcacgacgtcagacagcaaaatccttcatgaggccgtgaacaaagcatatgaacaaggtgttctgcttgttgccgcaagcggtaacgacggaaacggcaagccagtgaattatccggcggcatacagcagtgtcgttgctgtttcagcaacaaacgaaaagaatcagcttgcctccttctcaacaactggagatgaagttgaattttcagcgccggggacaaacatcacaagcacttacttaaaccagtattatgcaacaggaagcggaacatcccaagcgacaccgcacgccgctgccatgtttgctttgttaaaacagcgtgatcctgccgagacaaacgtccagcttcgcgaggaaatgcggagaaatatcgttgatcttggtaccgcaggccgcgatcagcaatttggctacggcttaatccaatataaagcacaggtaacagattcagcgtacgcggcagcagagcaagcggtgaaaaaagcggaacaaacaaaagcacaaaccgaaatcaacaaagcgcgagaactcatcagccagctgccgggctccgacgccaaaactgccctgcaaaaaagactggataaagtacagtcatacagaaatgtaaaagatgcgaaagacaaagtcgcaaaggcagaaaaatataaaacacagcaaaccgttgatacagcacaaactgccatcaacaagctgccaaacggaacagacaaaaagaaccttcaaaaacgcttagaccaagtaaaacgctacatcgcgtcaaagcaagcgaaagacaaagttgcgaaagcggaaaaaagcaaaaagaaaacagatgtggacagcgcacaatcagcaattggcaagctgcctgcaagttcagaaaaaacgtccctgcaaaaacgccttaacaaagtgaagagcaccaatttgaagacggcacagcaatccgtatctgcggctgaaaagaaatcaactgatgcaaatgcggcaaaagcacaatcagccgtcaatcagcttcaagcaggcaaggacaaaacggcattgcaaaaacgattagacaaggtgaagaaaaaggtggcggcggctgaagcaaaaaaagtcgaaactgccaaggcaaaagtgaagaaagcggaaaaagacaaaacaaagaaatcaaagacatccgctcagtctgcagtgaatcaattaaaagcatcccatgaaaaaacaaagctgcaaaaacggctgaacgccgtcaaaccgaaaaagtaaccaaaaacctttaagacttgcattccaggtcttaaaggttttttacattctaagaacatcgtacacaacctttttcccatccgcctcacaggcttttcatactattgctatacagccatgaacagcataaaatgaacgttattacagttatcaccacatatggcgggattgtgactgggcaggcaggcaagacccaatgatgcaaagggagtattaatgcctaaaaagcagggcattttaactcttcttttcgtgttgggctcataacggcgccttggacaaccccctattctcatgctccgtcgtcgcgtcgacgcgggcatttttgtcattttcagccgatatttctcacttttttcattttgattgtcaacttttcatttgatacgatgaacaagccgacttttcttcagcaaaggaggttttgattgcttgcataaagagattgcaaaagaattactgctgctcgcaggaggaaaaaacaatattatcagcatcagccattgtacgacccgtcttcgttttgatgtaaaggacgagacgaaaattgatatacatgccattgagaacctgcaaggtgtgcagggcacctttttccgttatgggcttttccagattatcttcggagcaggcgtcgtcaacaaaatatataaagaagtcgttcatgtatgggagaacgcgccttctgaagaacctgtccaccagaaaaaagccagccggaagctgaaccctgccgcagcttttgcgaaaacactgtccgatatttttgtgccgattattccggcaataacagcaagcggcctgctcatggggctgatcggcatgattaaggtgtttcactggttcgctgccggcagcccatggattaaaatgctcgacctcgtgtccagcacagcctttattttactgccgattttagtcggcttcagtgccgcacggcaatttggcagcaacccatacctaggggcagtgatcgcggggcttttgacgcatcctgatctgctggacccgtctatgctcggcagcaaaaccccgtcttctttagacatatgggggcttcatatcccaatgatgggctatcagggttccatgataccgattcttctttccgtttttgtcatgagcaaaattgagaagctattaaaatcgattgtgccgaagtcgcttgatgtcgtgatcattccctttattacggtcatggtgacaggatgcctcgcgctgattgtgatgaatcccgccgcgtccatcatcggccagatcatgacacaatcgatcgtctatatttatgatcacgccggcattgccgccggagctcttttcggcggcatctactccaccatcgtcctatctggattgcatcatagcttttatgcaattgaggcaacgctgcttgctaatccgcatgtcggtgtcaactttttagtgccgatatggtcgatggcgaatgtggcccaaggcggagcggggcttgcggtattcctcaaaacgaaacaatcaagcctgaaaaaaattgcgctccccgcttctctgaccgcgtttttaggcattgttgagccgattgtattcggggtaaatctcaaattgatccgtccctttatcggagcagccatcggcggtgctattggcggagcatacgtggttgcggtacaagttgtggcaaattcctacgggctgacaggcattccgatgatttcaatcgtgctgccgtttggcgccgctaattttgttcattatatgatcggtttcttgatcgcagccgtctctgcttttatagctacattgtttctcgggtttaaagaagagacagaataactggatttattcgttttcattcataaaacgggggatgaaaggacaaaaaagctatgaaaattaaaagaatcttaaatcataatgctatcgtcgtaaaggatcaaaatgaagagaagattctcttgggtgcaggaattgcgtttaacaaaaagaagaatgatattgtcgatccgtcaaaaatagaaaaaacctttatcagaaaagatacacctgactataagcagttcgaagagattttagaaacattgcctgaagaccacattcagatttctgagcaaattatctctcatgccgaaaaagagctgaacatcaaaatcaacgagcgcattcatgtcgctttttcagaccatctttcttttgcgattgaacgcctgagcaatgggatggttatcaaaaatccgctgctgaatgaaatcaaagtcctttatccaaaggagttccagatcggcttatgggccagaacactgattaaagataaactggggattcacattcctgatgatgaaatcggcaatatcgccatgcatatccacacagcaagaaacaatgccggcgatatgacacaaacgcttgatattacaacaatgatccgtgatattatcgagattatcgaaattcaactgtctattaatatcgttgaagataccatctcttatgaacggctcgtgacccatctccgctttgccattcagcatatcaaagcaggcgaatccatttacgagttggacgcagaaatgatcgacatcattaaagagaagtttaaggatgccttcctgtgtgccctaagcatcggcacctttgtgaagaaggaatacggctttgagtttcctgaaaaagaattgtgctacatcgccatgcatattcagcggttctaccaacggtcagtcgcacgctgagacaaacaaaaaacgcttttgatcatctcaaaagcgtttttttatatctgtattattggttgatcgccgggttgctgatcgtattccacttcgtataggacatgtaatggaaatactcatcgcgatacggatgttttgtattggagttccaaggcttttctccgccgcagaagtgcacgattgccgggttttctctcgtttcattatattgcttccgccctaacagagtcgatggggttttcagctttaacatgatataggtttgagcgttccagcgcggatgaagttcataccactgatcatataaaatcgcattcagtgcatcttggtcatgcagcacaagaaagtcttcgtctgggtgttcattgataaagttgatgactttttctgtgatgttttgctttctccaagactcaaaatcaataatcatgatacctgagttaaaatacttccctgtatcagtgacgttcatttctttcaggcgttcatgctgccccgcatcctcaacagcggctacggtgtatggcgcaatgtctaagtcccatagcttagaaatatcctctaggacaagcgcatcacaatcgatgtaaatcattcgtttgatgctttcatccttaattaagtcgggaatcgaaatgcggtaatacgcggcttttgtaatatggctgctctctaccgcatgttcatacattttggtatccacttctaaaaactcaatcggcactccgaatttcaaagtggtttcttccagtctttttttgttatcaggcttaattccgccatcaatgacgtataattttacctctctctcctgatccatgttagtcaataaagaaacgaacatcccacctaaatgacgagcataattatcatctgcgcatgatacgatatgcatgatttcatctttcctcaatggtattcatctccctttttgttgtacaagttacataccctttttcaaaaaaataaacacgttctccgacatttttttaaacagaatgtgtgatacaacaaaaaaggtgtcattttttgaagatgcgataaagccagtaaagaatgaaaaagcttgcgattgtgatggcttcagccgagacgatataccacggccatggcccgagaacatctaagagagaggatccgcccggttttttcgtcaaatacatataattcgcgccaagccagcgatcaatcaggaaaatacagacgccgtacacattaacaagcaggactgtcacccataacgagcgctggcccattctgtaggtgccaatcacagccatcagcagacaggataaaaacacagacccgtgagaaataaaaaagaggatatatcggatatgcggaaatgaaaacattccgaggtcaggagtggcaagagcctgaatcgaactgccgatgccgacaaaaaacaaaaacacaaacagctttctgctttttgtcactaacataatagctgacaaatacaccgacaggtcactaagctggagaggcaatgaagtgcgcaccgaccacctgcccgtggcgaccaaccatatttgatagccgatttgcgaaccaagcaaaagaaacacaaacagagaacgcaaaaaccggctggccctcggctgcttgaccccctcttggaacaaaaccaacagaatggccaaaagggcgataatcgctaacgtcactacatgctctgtcgaaaacagatgaaacggatcatgcttatagacggattgaacatatttttgcaaaactgcacccccgtttgcggttttttgtttattttggcgttgtttgggctttttttattcaaccgatatatgggcttgaagttcacatcatcctctgttacaattcgtttcatagctaatgattctgataatttaaggcaggtctaaaaaatggaacgttcacatcaacatcagcagcttcggaaggaagaacacgatacactttctaagctcaaacaaatgcccgtcgagtcactcaacctggaagccatttcgatcgctacgaatctgtatcggtctgcacaaaggctccgtgtcaaaatggagactgaggttctttcttcctataacctttcttggaccgctttctccattctttatgatctatgggtatggggagcgctcgaaacgagaaaaatcgctgagctgtcagggatatctacagctacagcaagcaacgtgatcaaaacgctcgaaaaaaagagtttttgccgtaaaagcatcgacacaagagatcggcgactcgtgtttgtctcaatcaccgattccggcaaacaagcgatcgaagaactctacccggagtttcacaaaggggaaacagagctcattgcgggaatgacgaaggacgaacagaaaatattgacagggctgcttagaaaggtagctgacaatcttcatacaacataagctttgacgggaatccagtagcggtttgtctccctgtttcagagagccggcggaaggtgcgagccggcacacagcaaacgtgaattacctccccgagctttctttgtgaccttaaaagtagcaaagaacgggaaaccgttattcgaatgagcggaagacgatgtcttcaaccagggtggtaccgcgtgcattgagccacgtcccttatcgggatgggctcttttttgtgtttgtaaaaaaggaggaaaaatgatgaaaacatttgagcagctcacagcgtcacagcaaaaagaggtagaaagacagcttcagctatacatgacaggcgcccacgaagtcataccgccggaggaattaaaggcaaagctcgtgaaatcaatttccacgggcacgccgcttaaaattaagctcggattagatccgtctgcaccggatgtacatttgggccatacggttgtgttaaataagcttcgccaatttcaagaaaacggccacattgtccagctgttaattggggatttcacaggaaaaattggtgatccgaccggaaaatcggcagccagaaagcaactgactgatgaagaagttcagcacaatgccaaaacctactttgagcaattcggaaaagtgcttgatccagaaaaagtcgagcttcactataactcaaaatggctgaaaacattgaatctggaagatgtcattgaattagcagggaaaataacggtagcccgcctgatggagcgcgacgactttgaagaacgcatcgccatgcaaaaaccaatctcactgcatgaattcttttacccattgatgcagggatatgattctgtcgttctcgaaagtgatattgaattaggcggaacggatcagcatttcaatgttctcatgggacggcatttccaagaacgatacaacaaagaaaaacaagtcgtcatccttatgccgctcttggaaggcttggatggcgtcgagaaaatgtcgaagtcgaaacacaactacattggcattaacgaacatccaaacgacatgtacggaaaaacgatgtcactgcccgacagcctgatgaaaaaatacatccacttggcgacagacttagagcttgaagaaaaaaaacagctcgtaaaagacttagaaaccggcgcagttcatccgcgtgatgccaaaatgcttttagccaaaacaatcgtccgaatgtatcacggagagaaagcagcagaagctgccgaacactcgtttaaaacagtctttcaggaaaacagcctgccggaagatataccggccataaactggaaaggtgaaaaaacgatagcgatgattgatctgctcgtcaagctaaagctcctctcttcgaagagcgaggcgcgccgcatgattcaaaacggcggtgtacgcatcgacggagagaaagtaacagatgttcacgccaaagcagagataagagagaatatgatcatccaagtcggcaaacgcaagtttttaaagctccaatagtctgatattccgaaacgcttatgacccttcattcataagcgtttttttgcaggtataaagcagtcttttcaaaaacgctctccatcttgcaggaaactcctttagcatcccgaaatattccccaaccatacatttaggggaggtttatttttgatgaaaaagcttttgactgtcatgacgatggctgttttaactgccggcacactgctcttgccggcacagagtgtcacccctgccgcgcacgctgtacaaatatcaaatagcgagcgcgagcttccattcaaagcaaagcatgcgtactctaccatttctcagctaagtgaagcaatcggccccagaatagccggaactgcagctgaaaaaaagagtgccctattgatcgcctcatcaatgagaaaattaaagcttgatgtgaaggttcaacgattcaacattcctgaccggcttgagggaacactgtcttcagcaggacgcgatattcttctccaagcggcatccggctcagctccgactgaagagaaaggactgacggccccgctttacaatgcgggattgggctatcaaaaggactttaccgctgacgtcaagggcaaaatcgccttgatttccagaggagacctgacttattacgagaaagccaaaaatgccgaagccgccggagcgaaagctgtcatcatttataacaacaaagaaagcctcgtgcctatgacgccaaacctgtcgggaaataaagtcggtattccggtcgtcggcattatgaaagaagacggcgaagcacttacccagcaaaaagaagccaccttaaaactaaaagcattcacaaaccaaacctcccagaatatcatcggaatcaaaaaaccaaagaacatcaaacatccagacattgtgtacgtgacggcccattacgacagtgttcctttttcgcccggagcaaatgacaacggctcaggtacctctgttatgctggagatggcgcgtgtcttaaaaagcgttccatctgataaagaaatccgctttatcgctttcggcgccgaagagctcggcctgctcggctcctctcactatgtagatcatctatcggaaaaagagctgaaacgaagtgaagtgaacttcaacttagacatggtaggcacaagctgggaaaaagcgtctgagctgtatgtcaacacattggatggccaatctaactatgtttgggaatccagtcatacggctgctgaaaaaattggatttgacagcctgtctctgacacagggaggatcatctgatcatgtgccattccacgaagccggcattgattccgccaactttatttggggagacccggaaacagaagaagttgagccgtggtatcatacccctgaagactcgatcgaacatatcagcaaagaacgcctccagcaagcaggcgatcttgtgacagccgctgtctatgaggctgtgaaaaaagagaagaaaccgaaaaccattaagaaacaaatgaaggcgaaagcatctgacatttttgaagatatcaaataaaaaaagacggcacttgggtgccgtcttttttttataatgatcagctgtttagccgtctataagtaaagctttcagtttatcaactgtattttctttttctaacgggcgataaatggtcagtttcaaatcaggagagtcatatatttgtaatgtcatatgctccatcaccattgttccggctgccgggtgatgaagtactttttctcctgcgtgtgtgcctaatacttcgtggtggttccaccattttttaaattccgggcttctttcagttaactcatcgatcagctcttttatccatgcttccccaagaaaccggctggctgtcgatcgaaactgtgcgataagttttttggcgtggctttcccagtcgtcaagcagatcccgatactccttcgaggtgaaacatcgccatatggcattcctttccttactgcccatttggccaaaattgccgaacacagcacaagctgctgtgttccaagcaataacgtcccacttttcgtcagtcacataaacagggcaattggttaaatgatcaataaagtgccgcacagccagaggaaggctcttattatcttcatcctgatcatctaaaggaacatgatggccagccaacagaaagacatgacgcttttcctcataattcaatttgagcactctcgatatgctttccagtacctgtgttgatacccgaatatcccttccctgctccagccatgtgtaccatgtgacacctataccggacagctgggctaattcctctcttctcaagcctgttgttttccttctggtacccataggcaatccaaactcttgcggagaaagctgtgcccttttcagttttaaaaactcccctagctctttccgtttttctgccatactgtccacatacacactctccttttgcatagaatttcctattagtattctacataaaaaggagaaggtttttatattatttgtttcgttctccaaatacttcagcggccacaggaagaatggtattcagtgcattcggaaaacctgagtaaataatcatctgcatcatgacttctatgagttcttcttgtgtccatccgacattcagggctccgttaatatagaattttagctgctgggtattgcccaatgcagtcaatccagcaacggttgctaataatctggatttcagatcaagacctggtcttgaaaaaatctgaccgtagttaaactccacggcaagcacaccaaggtccggagcgatggaatgtttaaaattgtccacgatcgcttcatagttctcctcatcaatttgtttcagaatatctaacccttttttataacgttcacttgttcgcatcagcttctatctcccttccaatatcgcttttttagtagtacggtttatggtaatccttgaactgaaggcaataccgaccatgatcatccccaggatacaaacaccgttccaatgaaacagcatccagaccgcaccccctgcatacgatcccaaggcgccgcctaaaaacgtgctgaccataaagaggccattcaatctgctcctcatttcagccgacaattggaaaatctccgcctgacacgccacctgattcgcctgaatgcccatggtgatgaataaagcgcccaatacaatcacaatcaatgaagtctggcctgccattaataaaacaaatgacaataaggtaaaagacatacaaagcttgttggaaaaagcagctcctttttgatcaataatccggccgatcagcggagttgcaaaagccccgccaattcccaccaaaccgattgttccggcagtctggctgccaaacgagaatggaggttcactcaccataaacactaacgtcgtccaaaataaactgaaggcgccgaacatgaagccttggtttacacatgcttttcttaacactttctccttgatcaaaagcggaaataatgaagaaatgagttttccgtaatgaaatgcatgtgtccctttgcttttcggaaagcagaagtgaatgatcaacataatgatgacggctgctgcacaggcaatccaatacatcacgcgccagccataatgggcatctatcgccccgctgaccactctcgcccctaaaattccgcaaaccaagccgatagctacgtttccgagtacttttcctctgttcctgtcatttgctaaacctgccgcaaacggcacaaggatttgaggaataatcgtgaagaatcccaataataaatttgtgatgactagccatggaaagcttacagctaacgctgaagctgccgaacaaacccccactaagaatagcaggctcacaattaagcggcggcgttcaaaaagatctcccaatggaacaagcagaaggttccccgccgcatagccaatctgcgccaatgtagcaatcattccagcttgtgccggcgtcatatgaaacgtgcctgccatgctgacaagcaatgtttgattgatatagacattggctaccgtaaacccgctagtcaccgcgataagaaaaatcaaacctctcgataatgaaatggaatggttcatgtttacctcctttcttcatgcatgataaagcaggttcaatcatggaaacagaagtgagtttatactggtataaaaagtactagcaagcaaagcaaaaaagcgaaaccctgtcaggcttcgcttttgttatcaatccacttctttcttaatccccagcattttctcatctaggtaatgggcaatctccgcggcttccttcagctcatctgttaattgcttaggaacgtcattgttcaatttatagtaaattttatgttcaaggctcgcccagaaatccatcgcgattgtccggatttgaatttctgctttgacgtattccacacggttcgttaaattcacaggcatctcaatgattaaatgcaggcttcgatagccattcggtttgggtgtctggatataatcctttacctttacgattctcaaatcttcatgctgcttcaacacattcacgacattataaatgtcagaaataaaggaacagatgatgcgcacgccggcaatgtcgtgaatatgctccttcatttccttcgtcgtaatctcacagccctttctcattaacttattcacgatgctttcaaagcttttgacacgggattttgtatgttcaatcgggttgtgtccgtgaatgaggttatattcctggctgataattgagaactttgtatcgagcgcatctagcgcaaatttataaactaataattcatttttccaatcttccattactgtttttaaatcgtccatatgtgttacagataaatccattttcgtcatctcctttaacggaactttatccgctgtccatgtactagacgtccctgtctgctgcaaggttctatgaatttttttacaaaatgcggtcgattgtaacaaaaaaagaccgcacgaaacgagcggtcttttttattatcggaaatagctgatcaataatccgatcgagagcaggaatccgaaaaatgtatttgtttgggctgttgatttcattgcgacaatcatattcatcggcatttcgttctggacgaaacccttcactgcctgaaccggcttaggcacgctcaaaaagacgacaaacagccatgggcttgcggcaccggtaataaccaagccgacaacccagatataagcgacggcaaacgacgcagctaacagagtaacagctcccttatgccccatcaaaatcgccaatgttttgcgtccgccttttttgtcctcttcaatatcacgaatgttgttcgacaggttaatcgcgccgacaagaatcgcaatcgggatggaaatcaaaatgctttgcgtgttgatcatatctgtctgaatgaaaaacgaaatcagcacaaacaccgaacccatgcaaatgcctgagaataattcaccgaacggcgtgtacgcaatcggcagcggcccgcctgtatacaggtagccgatcgccatgccgacaaggccgatcagtgcaagccaccagctgctgcttgcacaaatatagacaccgagcaaaatggcaatcccgtatgaggcaagagctaattgcaaaatcgttttaggcttcattccgtggcgtacaattgcccctccgattccgactgattctgctgtatctaatccgcgtttaaaatcatagtattcattaaataagttcgtcgcgatctggatccataggcaagaaaacagcatagccaaaaacagcagcagatcaaccttcacataaaacatcgccaaaacggttccgagcagcacaggcacaaacgatgcggttaacgtatgaggacgggttaactgccaaaggatctgccccatgctttctttttgcggcgctgtctgaccctcacccttatttgtttggttcatcttcctcttcctttctattaaaaggcttactttttttcagccggcagcttaataaaaaactccttttgcttccttatctatcataatgacttctcccttatttcacaagataccgcaagaaggcgttttctttcttattatacgcttctcgccctgatttcattaggtttctgctttcacttgaacgaacaggtacagaaaaatttttttaagtacattacactttttaaaagttaaaaagatcttttgactccagctatcttttcctttattatgaatcagctcgaaacattccattcttgcccttgcaggtataaagattcattttcaaaaacatacgccgatatattaatttgagggagattagggaaaaaatgaaactttttgagcatctgatcgtcaaataatcatgtgattgtcgaaaaaacgggaagggaatttttgatatgctgcaattaatgaaacagctgtatgaaaaacccgctgtcaagtggacatgtcatacaggcttttatttgatgatactgcttgttttgttttttatgtatggttttcacaccgcgaataccggttcatatatttataacgatttctaattggagagagaataactatgaaacttttacatgctattcaaacacatgcggaaacttatccgcaaaccgatgccttccgctctcaaggccagtcgctcacgtatcaggaattatgggagcagtctgaccgcgcggctgccgcgatccaaaaacgcatttctggggaaaagaaatctcctatccttgtgtacggccacatggagccgcacatgcttgtttccttcttgggaagtgtcaaagcgggacatccttatattccggttgacctgtccattccgtccgaacggattgcgaaaattatcgaaagctctggagcagaattgctgatccatgcagcaggactctcaattgatgcagtcggccagcagattcagacagtttctgcggaagaactgctggaaaacgaaggcggctctgtcagccaagatcaatgggtcaaagaacacgaaacgttttatatcatttacacttccggaagcacaggaaatccgaaaggcgtgcagatttccgctgcgaaccttcaaagcttcacagactggatttgtgcagactttccagtcagcggaggaaaaatatttttaaaccaagcaccgttctcatttgatttgtctgtcatggacctatatccgtgccttcaatcaggcgggactttacattgcgtgacaaaggatgctgtgaacaagccgaaagtcttatttgaagagctgaagaagtccgggctgaatgtgtggacatcaacaccttcctttgtgcaaatgtgcctgatggatccaggtttttcacaggatctgctgcctcatgcggacacatttatgttttgcggagaggttcttccggtttctgtggcaaaagcgctgcttgagcgttttccgaaagcgaagatttttaatacgtacggcccgactgaagcgacagtggctgtcacatcggttgaaattacggctgacgtcatcagccgcagcgaatcgcttccagtgggcttcgccaaaccagatatgaacattttcattatggatgaacagggacagccgcttcctgatggagaaaaaggagaaatcgtcattgcagggccgagtgtaagccgaggctaccttggtgagccagagctgacggaaaaagcgtttttctctcatgaaggccagtgggcataccgaactggcgatgccggctttattcaagacggtcagattttctgccaaggacgtttggattttcagattaaacttcacggctatcggatggagctggaggaaatcgagttccatgtcagacagtcacagtacgttcgctctgctgtcgtgattccttatcagccaaacggaacagttgagtacctgatcgctgctattgtgcctgaggagcatgagttcgagaaggaattccagctgacaagcgctattaaaaaagagcttgccgcttctcttccggcatatatgatcccgagaaaatttatctatcaggatcacattcaaatgacggctaacggcaaaattgaccgaaaacgcattggcgaagaggttcttgtatgacgccttacagctcgtttttattctttatactgcttggcattcttcttctgccgacgatcattctcggcttaaacggaaaaagatttcaagcatacaacatgttcatatctatcattatattggctttaattttttcgcatgacttacacggggtcatcgcgctgtgcctgtttacaatatggcaggtgctcctgatcagcggctatctggcataccggcagaaagcgaacagcggctttgtcttttgcggggctgttatcgcgtctattctgcctttatttctgtcaaaaatatggccgtttctttcacacccgcagccgcatcatccgccgcataacctgatcagctttttagggatttcatatttaacctttaaaggcgttcagctgattatggaagcaagagacggactgctgaaagaacagctgccattgcaccgcctgctgtatttcatcctgtttttcccgacgatttcctccggcccgatcgacagataccgccggttcgtcaaggatgaacagaaggcttggacgaaagaagaatacgccgacctgttgtatacgggaatccataaaatcttcatcggtttcctgtataaatttattatcggctacgcgatcaatacgtacttcatcatgaatcttcccgcaatcacgcacaataagattcttgggaacctgctgtacatgtacggctacagcatgtatttattctttgatttcgccggctacacgatgtttgccgtcggggtcagctacattatgggcattaaatcaccagaaaactttaataaaccatttatcagtaaaaatattaaagatttctggaatcgctggcatatgtctctgtcattttggttcagagattatgtgtttatgagattcgtattttggatgactaagaaaaagtggatcaaaaaccgtatggccgtctcaaacatcgggtatttcctgctgtttatgctgatgggggtttggcacgggctcgcgccgcaatatatcatttacggcctctatcacgccgtgctgatgacgtgttacaactttttcgagaagtggaataagaaatataaatggctgccgtccaaccgctggacaaccattctcgctattgtgatcacattccatttcgtttgcttcgggttttacattttctcaggaaaaccatttcatcaccaccattaaaggagattagaaagctatggattttaaacaagaggtattagacgttttagcagaggtttgccaggatgacatcgtaaaggaaaatcctgatattgaaatttttgaagaaggtttgcttgattcttttggaacagtagaattgctgcttgcgattgaaaaccgttttggtattttagtgccgatcactgaatttgaccgggacgtttggaatacacctaacaacattgtaaatcagctgtctgagttgaaataatgaaaaagcgttttttcggtccaattattttggcgtttattctattcgcaggcgccatcgcaattccatcttcatggctgacaggcttcatcaccgataagcgtgtgaaagagtcagcaacagccttgaatccgagtatgtttcaagggctatatttacaagatcagatgctcaaagatccgacatatcttccgatttacgggtcttctgagctttctcggctggacgagttccacccatctaattattttcaggtaaacaatgagggattcacgccataccttgtcggcaaaggcggatcccagtcattgattcattctttaaacttcgctgcccatatggatcagctgaagggcaaaaaaatcgtattcatcgtgtctccgcaatggtttattaagcgcgggtctgatgaacagcatttcgcgccgaactattctgcgctgcaagggcttgatttggcatttaacgatcagatcgatcctgaaattaaaaagaaaatgatgaaacgcatgctgcgctttaaggctgtgcaaaacgatgccattctttctgagctgtacaaagcaatggtaaacggccagacgtggaaagtgaacgcgctgaagccggcggcgaaagtgtattacagcatgctggaaaagaaagatctgtattattcaacgacagaatcatccgggccaaagcgctatatctcgcagtcagtaaaggataagtcatggtctgaattgaataaactggcggatcaatcgggcaaacgccactccggttctaacgattttcacatcgacaaccctgtctataaaaagctgaagccgaaagtgcctaagctgaaagggaaaaacaaaggaagatcgtatgcggtgtcaccggaatatggcgactttgaaatgatgctcgatatcctgaaggatgcgggcgcagagcctatgtttgtcaccattcctgttaacgggaaatggtacgattacacgggcttcccgaaaaaaggacgcactgactattacaaaaaggtaaataaacaaatcagagcgaagggcttccaggttgctgatttctcagggcatgaatatgacccgtatttcatgaaagacaccattcacatcggctggaaaggctgggtgtatgtcgataaagcaattgacgaattttataaaaccggaaaagtcacttcatcctgagcatctcataggacgcggctgcatatttcctgctaagatttgaaatagtaaagaaatcacagccaacttaattaagaggtgttacatccaatgaagatgacaggcaatacggttttaatcacagggggttctgctggcatcgggcttgaactggccaagcgcctgctggaacttggcaatgaagttatcatttgcggacgcagcgaagcacgtcttgcagaagcgaagcagcagctcccaaacatccatacaaagcaatgtgatgttgcagaccgttcgcagcgggaagcattgtatgaatgggctttaaaggaatatccgaacttgaatgttctcgtcaacaacgccggcattcaaaaggaaattgactttaaaaaagggacagaggatctttttgtggacggtgatgaaattgaacttaatttccaagcgcctgtccatttatccgcccttttcacacctcatttgatgaagcagcctgaagcggcaatcgttcaggtcacatccgggcttgcgtttaacccgttagctgtttatccggtgtactgcgcaacaaaagcggcacttcactcgttctcgcttacgctcagacaccagctccgcgacacgagcgtggaagtgattgaaatggcaccgcctatggtggacacgggcttaaaccaaaaatcacgcgataaacaaggcctgacgtaccggggcatttcatctgaagaatatgttcaatatttcttggacggcttgaaggaaggcaaacaggagattacaaatgaacgggttgaaggtcttcgggatgccactcgcgccgattatgacaggttattcaagcaaatgaacacgcaggagaattaatttctcctgcttttttcatatgaatttcttacaaatttgagcaaacctattgcgattatttgttgaaggtatacaatagaatataattattttcaaataagtttgataatataaacaatttaacagcagggagattgaccatgactaaacaaacaattcgcgttgaattgacatcaacaaaaaaaccgaaaccagacccaaatcagctttcgttcggaagagtgtttacagaccacatgtttgtaatggactatgccgcagataaaggttggtacgatccaagaatcattccttatcagcccttatcaatggatccggccgcaatggtctatcactacggccaaaccgtgtttgaagggttaaaggcttacgtgtcagaggatgaccatgttctgcttttcagaccggaaaaaaatatggaacgcttgaatcaatcaaacgaccgcctctgcatcccgcaaattgatgaagaacaggttcttgaaggcttaaagcagcttgtcgcaattgataaagactggattccaaatgcggagggcacgtccctatacatccgtccgttcatcatcgcaaccgagcctttccttggtgttgcggcatctcatacgtataagctcttgatcattctttctccggtcggctcttattacaaagaaggcattaagccggtcaaaatcgctgttgaaagtgaatttgtccgtgcggtaaaaggcggaacaggaaatgccaaaaccgcaggaaactatgcttcaagcttaaaagcgcagcaggtcgccgaagagaaaggattttcccaagtgctttggctggacggcattgagaagaaatacatcgaagaagttggaagcatgaacatcttcttcaaaatcaacggtgaaatcgtaacgccgatgctgaacggaagcatcctggaaggcattacgcgcaattcagtcatcgccttgcttaagcattggggctttcaagtttcagaacggaaaattgcgatcgatgaggtcatccaagcccataaagatggcatcctggaagaagccttcggaacaggtacagcagctgttatttccccagttggcgagctgatctggcaggatgaaacactttcgatcaacaacggtgaaacaggggaaatcgcaaaaaaactatatgacacgattacaggcattcaaaaaggcgctgtcgcagacgaattcggatggacgaccgaagtcgcagcgctgactgaaagcaagtaagaaaaagccggcccagtacaggccggctttttttacgcttcaattttgttgaaaaactgcggcagatacgctttgtgcgcctccagcatttcatctaaaatctgtttggccacagtatcggacgggacaagagggttaatcgtcatggcaaggagcgcagtttgatagtcacctgtaactgccgcttctgccgcgacacgttcaaaggatttgatttgctggacaaggccgcggacagacaccggcaagtcgccgacagcaattggcttagggccagttttcgtcatcacacagttcacttcaactgcggaatcgtctggaatactcgctattgcaccgttattgatcgtgttcaccggctgaatgtcgtgtttatcattgtaaatcgagctgattaagttacatgctgcatcactgtagtaagctccgccccgtttttccagctgcggcggtttgatcgcaaggtttggatctttataaagctcgaacagctctttttcgaccttctgtacgacttcagcgcgggtgccctccatttgtgatgcttccagttcgtgctccagcatctcttttgttttgaaatagtaacggtgatagccgcaagggatgacattgagcgcttttaagaaatccggttcccattcggcgcctgagatatttttcatcgtcatcgcgtttttcgggtcgcccatcgcctcgatgacttgctccttcacacttacgccatccaagaaaacatccagcccaaataccatatggttcagtccggcgaattggacttctacgcggtccacatctacatcaagcgctttggctacgcccattttgatgccgattggaacattacagagaccgacgactttcttcaggttggagtagcgaagcaaggcttctgttaccatgccggcagggtttgtgaagttaacaagccaagcgttcgggcaaagctcttctatgtcctttgcgatctcaaggatgaccggaattgtgcgcaatcctttaaacaggcctcccgggccgtttgtttcctggccaatcactccgtattttagcggaatgcgctcatcctttgctcttgcctgcaaaagtccgacacggaattgggtcgtgacaaagtctgcgtctttcagcgcttttctccggtcgagcgtaagatgaatgtcgatcgggacgccagctttttcaaccatccgtttggcgagtgtgccgacaatattcagcttttcttcgccctcggggatatcgacgagccataattcgcgcacaggcagctcatcataccgtttaataaacccttccactagctcgggcgtatagcttgaacctccgccaatcgttacaatcttcaatccttttgtcatatgcttgctcccctttgctcggtgattttttcatataactcaatgatctctgcagccatatccttcactgtcattgcattcattaaatgatcctgtgcatgaaccatcagaagcgtcatttccgtcttttctccgctcgcttcattttggatcagctctgtctgataatgatgggcttttgacaattcttcagcagcgtcttgaagctttttccgcgcttcttctgcgtcaccgcttttcgcagcggcaatggcctccattgcggagctcctaccgtttcctccgtgaaggatgatttgaaaaatgatttgttccatttcctcattcacgcgattcacttcctttctctacagagccgcttctttgtcatctgatgctgcaggcgtttggaccagctccagatcgttttcttctttcagcttctgcttatcccacattctgaagaatggatagtagacaacaaaggacacggcaatattaatggcttgcatgaccgcacctgagacttttcctcctgtcgccaagtagcctgaaaagatcggcggcatggtccacggcactgcgatacccgccggttttgcgacaaggccggtgctcattccgatgtacgtaagtgtcactgtgacaagcggtgtgatgataaacggaagtaagagcattgggttcatgacgatcggcattccgaatataatcggttcgttaatattgaagatggccggtccgaccgcaagcttcccgagctgcttcatttgtttgcttcgggcgcgcaggaacatcgtgacaaccagtgccaatgtggcgccgcttccgccgatattgacccagatatcgaaaaattgctgggtgaaaatcttaggaagctcctcaccggcttggaaggcgatccggttggcatccattgcgccgtaccaaatcggtgccatgacgccgccgacaatgtttgcaccgtgaaggccgcaggcccataaaagcattttgacggcttcggcgacaaggcttcctccaaggcttcctcccagaatggaaagcggagtccccaataaaacgcttacaatattatgaaggctttcaaacggtgtcgcttcaacaatcagccgggctgcccaaatcaggaagatgacggcaaagccggggattaacgcgacaaatgacttgcttaccgccggcggaacaccgtccggcattttgaagactaaattgcgctggataatgaggcggtaaatctctgtggacaccattgcgataatcatggcgacaaacaggcctttgcttcccatgagcgaaagcggaatcccgccgccaaccatgatttctttcgtcgcgccatccggcataaacggcacttgataaggtgttgctaataaaaatgccgcaagggaaatggctccggccgacaaggcatcaacgccgtatttctcggcgagccggtaggcgatgccgaacgcggcgacaagacccataatttcaaaggtcgcgtcgactgggtaggccagtttttcagaccaggagctgccaaacgtttttgccataaactcagcgtatcccgggatcgggaggttgccaatgatgaggaaaaaggaaccgatgataatcaggggcatcgtgaggataataccatcacgcagcgcctgcaaatgacgctgtcccgcaattcttcccgctataggcatgaccttttcttctaagatctgattgactttattcacatagcccgcccctctctatgacacatgtccaagctgttcagctgatttcagcacttccgccccgttgcacgtgccataatggacggtattaatgacgtctaccggaaccccctttgactctcctaattttttgagctgcggaagcatgtaacggacttgcggaccgagaagcaatacatccgctttatcgatatgattttgtacagaatcgcctgaaactgcccaaatggtatagtcttttccctgttcctgcgcacttttttccatcttgctcaccagtaaactagtagacatgcctgctgcacaaacgagtaatatattcatgtaaaagaccccctagagtttgatcaattttgtaatgtcctgctgttgctatcatcatattatgaaatcgctttcataaacactcagggtttttccgcaggcaacggaaaaaaggtatatacaggctgtcagctcagcattttttggtcaaacacatccgaaagctcttgaaatgaacggcatttgaccagctggttcaccgccgccgggtcatccaaaatgctgccaagcagtttatacatgctttgcaagtccgctttgttctccttttcgacacaaagcagacagacaaattgaactcgctgactctcccaatcgatcggttttttgagcgtacaaacggcccaaaacgttgttttcgtctgcggaacaagcgggtgcgggatggcaacaagattgccaaaacacgttggcgacatgtcttctctttcaaaaatggaatctatgatttcttcatcggcaaagccgcattcgaccgctttctgccctaaaaattgaatcacttcttcttttgagcgcagatcctcctgaaaaaaaacgagttctttttttaggtagcgattggctttttccttttcatcactcagaatagattctatttttgtaaagtcagttccgcctaagatggtgttaaccttcagtactggtacagggagctcttttttaatcggaatggtactgatgacaaaatcaattgattcgtaggacatttgatcaagactataatactcagccgttccaagaatatcgagccgcttgccgaaatgggaacgcagtttttcgcgcagaagctgggcgcttccggcacccgatgcgcatacaatgatacagcgtttcggcggactttctgttttttttcgttcaatcgcggcgccaaagtggagagccaaatatccaatttcgttttcatgaatctcaatacccgtttgttcctttatcacgattccggcaatgatcccggcttcaaaagcgagtggataatgttccttgatcgctgccagcatcggatttcgaagattcatgccgtatcggttgcggctgatcgccggcttcatatgcagggccaagccgattttcagctctttgtcatgcaggatgccaagcttcagttcacgatcaacagctttgatcatggcaagtgtcagctgatcggtttcctcttctattgaaaatgtgtcctctccgcattgtgattgtgtcattcgttttgtgccaaggagatgcatggtgatgtaggccgtctcgtctttcggaaacgtaacggcaagctttgattccagctcttttacgatggcttctgcagcctggtactccttttgatgcaggatatgatccatatctttcgggaaaagagaaacatagttttccgttctgatccgtttacaggcgatagcgatatggataatgaggttattcagtcccatgttggacagagggatgcggtcgtttttcatttttttcaagatggcggaacggatgatctcaatttcttcttttggcaaaatatcagccttttcatttaaaacatctatctccgtttctctttcatcaacaatgtactccgccatgcagtacctcatctgcacctcgtccccgcgcagcttgaagccgtaattcggacgtgtttccatgacgatgcggtaaggcagcagacgtttctttacttcctttaaatccgtttggagtgtagattttgagataaatagttcttcagcaagttcatcgagcttgagataatggtccgccagcagcagacgtttcataagataggccattctctcctccggcaataccggcaggccctttttttgctgaaattcatcttgcagcagtgttctgaatacttgctcgtcatcaatgcggagcttgtagccggagcctcttacagattgtacaaaggcaccgtggccgcttagcacaccttgaagttcctttatatcattgcggactgtccgcgtcgttacgtttaattgcgcggcaaaaaacgaacttgtcaccggggcttcagccgccatcagcaagcgcagaatatcacgtagtcgcccatgaagcatgagaaaaacctcctaactagtagatgcagggattcagtgaataggcagaaaggatgatgaagggatgcgaaatgtatataaattctataatggagagaatggcaagtcaatgaacatccggaggactagagggaaaactgacctataaaaaaacagccgggatcagccggctgttctagatgcggacatattcttttgtttagacgccttgcggtccttcatgatttttcgaacaatcgggtaaatgaccggcgcccatttgataacggttttgatcatctttttcaaagctccgattctcccttcttttttctcaaccattcccctgattgcctcttccttaaacatgctaacgcgacacgtacctgtttcccgtcacccagaaacgccatggataatcgcgtgcctccccgctgttgtcaatgccgatgcgcgggccggttgaaattgcttccggtgtgtacccgctttcgatgtaaagcggctgttccgtgatccagcgtccgtagtcattcatcgtgacgccaagcgctttcgtcagctttcctggtccgtttgtccattccctcggactcctgcccggccttctctcctccattaacagctggccttcatgcggctcaatcgccctgattaatactgcttgcgggacatcctcttccgccgcaacgacattcagcaatgtatgggtgtgcatcacgtatgtatatacccgcccagcttctgcaaacatgatctcagtccgcttcgtccggcggttgttaaagctgtgggccgctctgtctccagcccccatataggcctctgtttccacaatatagcctgacgctgtgccttcgtctgtttcttttacaagaaggcagcccagaagcgatggggcaagctcaagagcggttttttgataaaacgtgatgggcagcggatttttttctctcgtcacgaatcgacctctccttttaccgatttttgtacattgtaccattcccgaagcagatcaaaaaaaacggctgttttaaaatctttccattcagggaatattgttaccgttcaaaaaaggagggccaaccattgaaagatgatcatcaaaacaagcagcaccaatcaaatgcccaagggagcgaggaagcgttttctcataagacatccgggaaaaacgagtcagaggataccttaacgaataggcaggggcatcctgttactgacaaccagaatgtgagaaccgtcgggaatagagggcctacaacacttgagaactatgattttctcgaaaagatcagccacttcgaccgggaacgcatcccagagcgggttgttcatgccaggggagcaggtgcacatggatattttgaagcgtacggaagcttcggagacgaaccgatttcaacatacacaagggccaagctctttcaggaaaaaggcaagaaaacaccggcatttgtccgtttttcaactgtgaatcatggaaaacactcgcctgaaacattgagagacccgcgcggttttgctgtaaagctatatacagaagacggaaactgggatttggtcggaaacaacctgaaaatcttttttatccgcgacccgctgaaatttccggatcttgtacacgcatttcagcctgatccagtgacaaacatccaggatggtgaacgtatcttcgatttcatttctcaatctcctgaagcgacacacatgatcaccttcttgttttcgccttggggcattccggccaactaccggcaaatgcagggttcaggcgtacatgcctataaatgggtgaatgaggagggcaaggccgttctcgtgaaataccattttgaaccgaagcagggcatccgcaacctgacacagaaggaagcagaagagattcaagggaaaaactttaaccatgccacacaggatttatatgacgcgattgaaaatggcgattatccagagtgggaagtgtatgcacaaatcatgagcgatgatgagcatcctgaactggactttgatcctcttgatccgacaaaactgtggtataaagacgattttccatggaaaccgatcggcaaattggttctgaacaaaaatccggaaaactaccatgcggaagtggagcaagcttcatttggaacgggggtgcttgtcgacgggcttgatttttcagacgacaaattgctccaggggcgtacgtttgcctactctgatacgcagcgctaccgtgtaggcgcaaattacctgcagcttccgatcaactcgccgaaaaagtatgtcgccaccaaccaggaaggcgggcaaatgcaatatcgggtcgatagagcagaaggacaaaacccgcacgtcaactatgagccatccattatgggcgggctgaaggaagcgaagcaggacggaaaagaccatacgccgcatgtcgaaggcgatgtaaagcgtgaagcgattgacagaacaaacaacttcggacaggctggagaaacgtaccggagatttactgaatttgagcggaacgaattgattacgaatttggtgaatacgctttctacgtgccgaaaagaaattcaggatcaaatgattgagaatttcacaaaagctgatcctgactacggaaaacgcgtagcagaagggctaaaaaaggtttccgaaaacaacagcaacgggccgatcggcacaactgaaacggaacaggctgcaaagcaggctgaacaggagagccatccatctaatccgtattaacaacagcgaacagggctttttttgaagccctgtttttttatttttctattgaaacgttttcaacaattgtgttgtactggaaggaaaggggtggagagatacgatggaattacagcaggacttgattcctcagaaaaaaacaatcggcgccttagatcacgccgtttttttatgcatggtattttgtttctggttttcaggctatatttacgttcctgtattcagtctgtatttggaggatctgcacttttcatatggcgcaatcggcatcattctcggcagctacggggtcacgcaaatccttctgcgattcccgctcggccttgtgtcagacatcctgttttccttgcgcaagcaattgttaattgccgggttcggcttttccgtcctcagcagcctgctttttctgatgtttgattctttcttcttcgtgctggccgcccggcttttcgcgggaatcactgcttctatgtgggtgatggcgaccattttatacgcacattatttcaacaatggcaatgcatcaaaagcaatgggcatcatgcagttttttaccgtcatgcctcagtttgccagcattgtgttctgcgggcttgcggcagcccatttaggcaggcaggttcctttttggatggcgctggcagcctcggtcgccggtctggtgatctgctgctttattaaggatccgtctgctcctcccgcaaaccgtgacaccattcgtgtcaatcagtacatcaaagatacattgcagctgccaaagctgaagcttttcaccatcctgtctatgacggcccatgccgtattatttatcacagtattttgttttacgccgctttacatgaatcagctcggaatgggtgacgcggagcttctttgggtgatgagcgcctttttcctcccacacgcagccgccacattaagctttgtgtttctgcgctttacaagccgtatcgcttactccgtgatgctcattagtttcgctgtcaccggggtctgtttgctatatgttcctttttcagctgcattgttcacggtttgcatcacacacgcctgtatcggactggcgctcggcttcgtttttcctctgttgctaagccatgtcgtcgaaatcagttctgcccgattaaaaatgtcagtgatggggttttatcaatcattttatgcgctaggcatcttcctcgggccccttcttgccggaaaaatcgcacagcttgtcgggcttgcgggagttttttatggagccgggtttctggcatttgccgccttttttgtgatgctcgcgcaaaaacgtaacatgatcaattaatagctttcataccgccggaagcgccacacagaaaacacggccagaagcatgatgcacagaatggagaaagtgagtgaccatccgaaaaaatctgcccgctctccatgaagaaggatatgctccgcctgcttgcaaatctcagccggaagccacttcgcaccatctggaaatagtgaaacagcaaaggaaacggctgctgtgagcccgatcccgcaagccgcagctgctccgacagaccggaatatcgtacttccggcaaggccggcggtcacaataaatatcacccaaagcgcgtaaaggccaaggcttgcggcaaagcggctgaatgatgcgtcctcaaacagcagccggacgtaataataagcaagcccgtatccagctgcaaacgacataatgccgatcacgctttggatgagccatttactcacgatataatgggctgccgtcacaggccgcgacataatcagcgctgttaccccttgatttctttcattggctacactgcccatcacgctaaagatgaccagagccatgccaagcgtgttgaattgagaaagcgtgcttaccatcacttcagacccggagggcatcgtaaaactgattttcatgccgtcaggaaggttccctccatgtgcgatgatttccggcatataataaatggtcagcggctgtgtcagcccgacgatcatcatcgcaatcggcagccaaatcagcttgccgcttttccatccttccagccactccttctgcaaaagcgccatcatcaccttcatgcgtgcaccacctttagatagacgtcttctagagactccgttttctgttcaaatcgggtgacggtcaatccctttcggatacagtcacttaataatgaccggccagcttgtatatcaggcagctcgaaaacagcttgggacggatttttatagacaatagctgagacgtaaggcttctcttcaagccagccttccagcttctctttcactgaaagggtaaaaacgttcgtttgctgctgttgtttcagctcctgtaactcgcctttccatgaaatttcaccatttttcataatcaccacttgatcacacacctgctctgcatcgtgcaaaacatgtgtagaaaacagaacggccatatgctttttcagctcccgcatcatgtccagcacctcgaaccgtcctgtcggatcaagcgcagacaccggttcatccaatatcaaaaacttcggtttatggagcagtgcctgtgccagaccgagtctttgtttcatgcctcctgaatagcccccgatctttttgtgcgccgcttcgtgcaaacccacaaattccagcatctcgccgatttcctcttggcattttctcttcgaaaggccggacagtctccccgcaaatgtcaaaaattcatttgcggtcatccaggaataaaaagctggatactgcgggaggtacccaatcaaacgccgatccggctttttttctcctaacagcttaatgtttccggaggttggcgaaagcagaccggccagcatttgcagagtcgtggttttgccggctccattaggtcctaatagtgcgacacactcattttcattcacgtgaaaactgacattctttacagcttcatgatgcctgtacgatttgcataatgattcaatagacagcatatcggcttacctttgctttctgccgacggtaaaaaacaaaatcggcccaataatattgatacatacaatgattgcagcccacatccactttggcccgtttgtccgctcttcttttatacagctgataagggcaaacaccgccaaagccagctgtaatacaatcagcggcaaaatcatttcccaagaaatattcattgcttgatcccccttttcttccgatccggcctaatgacaaaaaagtaataacaaatcagaggcatcggtgcttgaatcaatccgacaatcccccaaacccatgccatgcgattacgttttttcgcatcaataaataaaaagattccctgcgccaatacgatgagacaagccgcaaccgttatgataatttctgtttgtgtcatccgcgtttcacctcgcattcgccgagatgcctttttttctcagccgcaatcaaaatcggcagcaccgcaagcacacaaacctgaagcacaataaacacagcaggagcttgagtgaaagctaagattgcagcactcacaaccatcagcgcgcagaatacaaataaaatgatctcttgaagaagtttttttctgtattcagctttcatttgtgacagctggtgaagcagttctttttgattcggtatagagggattggctgtttgatcaatttttttccattctgactttaaatgatcagaaagcttttctttattcatcgtcccactcctttctgatttgctggagccctttatgaactctggactttacagtgccttctttgatttgaagcatcaccccgatttcagcgtaggtatagccgtagtaatgccttaataaaaccggtgtgcgcagtttagggtccagctttgaaaacagatcgagcgtttcgctccactctgcccctttcgccgacacgtcccacttgatcttgcggattgtttcctccgtaactgtctgattccgtttccattctctctttctctttttctgatgatcgagatagagccgcgatgcaatggagatcagccatgtggagaattttgaacggccctgaaagcttcttaaatggatgtaccctttcagaaaggtttcctgaacaagttcctcgctgagatcggggtgaagggaaagctttaacaagtatttatataagaaagaatagtgatagtggaaaagggctgtaaacgcctcgtcgtttccctctttcgcctgctggatcagccgctgttcttcatgtgtatccaatgaccgtgatccccccttttttgtttttctgccttatgagacgacaccggattcaaaagcgttcatcttttttacaattcttttcagccattgacagatcaggcttcccggccgtttggctgcatatccttatttgtaaacccccttatagtctgttaagctatgactttatgtcgatttcaaaaaaacatccaatatggaggacgatgcattgaaagtagaaaggcgaacgattgaatatattccgaatgaagaaagacatggtaaagcgaaagatttatttcccgtatggttcggggctaatatgcatatcaccacgttagtgaccggcacgattcccgttgcaatgggacttaatctgttttggagtgttgccgctattatttgcggaaccttaatcggtgccatatttatggcgtctcattccgcgcaaggccctcagctaggcatcccgcaaatgattcaaagccgtgcccaattcggcgtaatcggagcgattcttcccctcttcttagtcatgtttatctaccttggtttcttcgcaagcagcacgattctggcggccggaaccttaagcagctttgttcccatcccgggatcatggagcattataggcttaagcgccttatgttttttactcaccattttcggccatgatttgattcacaaaatgcaaaaaatcctttcttggacctcttttgctgtattttttgctgcaacgattctcatttttcaattgccgattccggcaggcagctggattcccggagcgattgatctgccaattttcttggtggcagtcagcgcagttgcgacgtggcagcttgcctacgcgccatatgttgccgattattcaagatatctgccagttaaaacaccggcttcaaaaacattttggtacagctatgcaggtacatctgtcagctccatctggatgatgctgctcggcgcattgctgacaacctcacttcctgactttacggcaaactcaggcagccagattgtccaattgttcggtcccttctcgtttattatgctgatcattgtgttatttgggcaaatggcgatcaatgtttttaacctgtatggggctttcatgtccacgacaacaacgctggagccatttctgaaattaaaagtcacgcccaaagtcagaatcatcatgatcctgggtgtcacgcttgtcggcacagtcttaagcctactgggacagagcaattttatggagctgtttttgaattttatctttttcatcagttatttcttaattccgtggacggcaatcaatttagtcgattactacttcgtccgccacggaaagtatcaagtcaaagccatgttcgacgtaaacgggccttatggaaaggtcaattggatcaccacaattgcgttcgtgctgtctatcttgctggaaattccgtttatcaatacaagcttttacatcggaccgcttgccaaaatgtttggcggcggagacatcgcatggattatcggcttggccgtgccttctgtgctttactatgcattaatgaaaccgcgtctgaaaaaacgggcggggtatcaagaaaagctgtcttctctctgaagacagcttttttatcattcaaatcgtttccacacgcggggcaggatgtcagatagctcatgagcgagcaacgtatgagcggagtgctcgtccgtccagagctcggcgcacgcaccatgcaaatagaccgcgtttaatatggcgtgctttggatcttcatggcagcagagcatccccaatatcatgcccgtcagcgtgtcaccggttccgcccttggcgagcgccccgtttccagttggattgagccagcagtctccatcaggaaacgcgatgacggtttggtttccttttaacacaatgacagtctgcagctgagccgcccattcctttgcatattccgctctttttttctgcaattcgttcacgggcacccctgtcattcgggaaaactcgcccgggtgcggcgtgaggatgacgggggcctcccgtttcggatatgtgcgcttcgccagcgctccggcatccaaaataacaggacaatcagccgtaagcacatgatcgactgcctgctgtacgctttccgtttgcggaaggcccggtccgatggcaatggcccggtacgtctcttcaagctgagcatccgccgcctttttccagccgtcacgccaataggtcgcctcgggcaaaacaggaacaattagcgggattacgctttctgatgtaccgatgacaagcttgccgagaccgctccgcatggccccaagccctgcaagcagcgctgctcccggcatgtcgtcacttccagccagcagcaaagccgtaccgtacgtgcctttatggctctccgcatctctttcaggaagcgtggcccttacatgctcttccgtccaaaatggaacattcatctctatccctcctctgctttcttttcctatttttcctgtcccttttctttttcaaacaaaaaagacagccttttagggctgtcttttattttacaggaacatcaaggtgatacaggcggcgatatcgttcgtttgccgccagcagctcctcatgggttccttccatttctgttttgccgttttcgagaaatacgattttatcggctgcttccactcccgcgagatggtgtgtaatccataaaatcgtttttcctttcagcacctcaaacaccgtttccatcaattcacgttcggtaataggatcgaggccgactgttggctcatcgaggatgatgatcggtgtatcctgcagcaaaatcctcgcaagtgcgatccgctggcgctctccaccggaaaaacggatgccggtttcttgtacagaggtatgatatccatcaggcaatgactcaatgtagtcatgcagcttgacctgctttgcggcgcggcgcacatcctcgtcgcttgcttctccgtttccgagcctgatgttgttcaaaatacttgtatcaaacaggtgcggtttttgatttaacacggccaccgcatccgcaatctgatcctttaacagcgctgtctccactccgtttaacgtcacagaaccggagtccggtttcaaggcgccttcgattaatgcaagcgatgttgatttcccagagccgcttcggccgagcagcgccattttttctccttggcgcagcgtaaaggaaaagttgtgcagcacttggctgctgttgtcataagaaaacgtcacatcacgaaaggccaaggtgacatcttgaagatcgagcatttgatcccctgattcagtttgtgacgcctccagctgaggagccaccttgttcatgcgtctgatagaatcctgatagcccggcacttcgcctaaggcatccgaaagcggcaaaaaggcttccgtcaacggaaataccactagcacaaaagcggcaatcatcgttttagcgagctcgccgtccgcttgctgtcccgctgtccaaaacagcatcatcaaaataaggccggcgacaaggcattgcgcaacaaagtcccgccatcttgtaaagcattgttttttccgttcaagctcaaaccaatcatgttcctctttttcataagcatcaataaaagcatgccggcgtccgctgaacatccagtcgctgacacccatcacagcatctgtcagacggctgtacagcgcattccgtccgcttttcagcttcgcattcttcgctctcgtcacgagcaaagacacaaccggaaacaatacaacaagaacaaacaaatacagcgcaagcaatatggcaaacggccaagagaagaagccgagcgctatcactgacacagcatacaggagcaaggctgagatcgcaggaaaaatcgtttttaagaatgcatcctgcaaatgctcaatatcctcagacaaaatgccgagcatatcccccgtgcgaaaacgggaacgcagcatcaaagcacccggctcaagcatattgtaaaggcggacgcgcatgtcggatacgattttcaaaatgatgtgatgcccgacaagccgttccacatatcgcgacacagaccgcgcaatcccaaaagtgcgcactgcgacaatcggcacataaatgagcagaatgttttccggccttgtcgccgctttagaaatcaaaaacccagaggtgaacatgagaaaagcagcagaaaaaatcgtcaccgcgcccaaaaagataaccagaacaaacaggcgggcattttgcttgatatacggcaaaatccattcttctttcttcatgctctttcccccagttgtgccttcacgagtttggtatacacaccgtttttctccagcagttcattgtgagtcccgatttccgcaatcctgcccccgtccagcacgataatttcgtccatatcgagcatccagtgaaggcggtgagtcgcgagaaagacgagcttatcctcaaataaatccagcatcgtttcttttatttcatattctgtttcgatatcaagatgggcggtcggctcatccagcagcaggatcggacggtttcccaaaaaggcgcgggccagcgcgacacgctgtgcctggccgccgctgagcgcccggccgccttccccgatccgcccctctaatccttgaggaaggctatccaccagctccgccagtccagctgccgcagcagcacgggctgtatcctctgccgaagcgcttggatggtagaagcgaatgttgttgccaagcgtatcatcaaaaatgtacggatgctgtggaatgtaaagaaggttcttctgccagctgccgtcctgcaaatgggaccggcttgtaccattaacctcaatcatcccgccatccggctctaaaaatccgccaagaatatcaattaatgttgattttccggcgccgcttgcaccgataataccgatttttttcttgcccttgaatgagagatgaatatcagacaccgaacggccgactgacacgcctgacagcttcagctcatcctgatcagaccaagcctcgagctgaagcggcgtctcttctttaaaaccaggctgcgacaaaatctcttgaatggtttttcctgcttcctggccgttcagcgttgcatgataatcattccccacttcccgcaccggcaaaaaatactcaggcgccagaataagcgccgttaaagcagggccaagcaaaatatcgccgtcaatgaggcgcaggcccagaaatactgcgactgtcgccaccgacagcatcgtgaaaaaatcgagggcgaatgatgacaaaaacgccacccggagtgtgctcatcgttgccttgcgataccgctcactcacatagaaaatatttttgctgtgtgacttgctcaaacctaggaaacgcaatgtctccagcccgcgaagagaatcaacaaaatgattggaaagtctctgataggatttccactgacgatccgcttttctctgcgcgacaaggccgaggagaatcataaagatgatcagaatcggcatagcagcgactaaaatgatggctgatgtccgatcctgaaaaaacacataaatgacaactgccgcaggcacaatcgccatgctgaccattttcggcagaaacagctccaggtagcggcggaactggctgatgcctcccatcgccagcgtcaccatttgccccgtcccctctttctttgcaaagcgggggcctaatcggaacagctgatcaagaaaacttttcctcaaatctgctcctgtccgggcggcgtattgatagacgattttctgtcgcgccaccgtcaccccgtgccgggcgataaaagcgatgaggaaaaagccgatcatcggaaaaagggaggtaatgcccttcccgttgaacagtccggttacggcctcactcagccactctgcctgcataataatggcggctgtctgaatcatcgttaaacaagtaatcaaggtgagaatccgcttcattcctttatatcgaaacaggtcttttcccattaataagtcataggctccttatggctgacgcgcttccggaagacataatagctccagatctggctgccgatgacgaacggcaatagcgttaatgctgcaattgacatgactttaagcgaataatctccggaagaagcgttagctactgttaaatcgtatgcgctatgaagcgagctgaccattacgcgagggaatagggaaataaagatcattcccacggtcagcgccagaccagcgcctgtcatcccaaatgtccagccgtcttttttcttacgaataaatacagccgcgagcataaagcagatgacaatcaaaacagcgagcggaatggtaatctcgccgcggcgtgtaaacatgtctgtctgatacgcagaaagggccgcgaaggcaagaaccgctacaaaaacaacacccattatcttttgcgccattttccgggcgcggttttgcaaatcaccaatcgtacgcagcgtgataaacattaatccatgctggaagcaaagaagcgttaccgtcacaccgccaagtatagaatatacattgatataatcagaaacatgtgcgtgaatgttcatgtcggcatcaatcggcatcccgcggaataatgtcgtgaacagcacaccaagcacaaacggaggaatcagactgccgaagaaaacgacccagtcccaaacctttacccattttaaatgatccaccttgccgcggaactcaaacgcgaccccgcggcccattaacgcaagcagcactatgacaaacggaatgtaataaccgctcagcatcgttgcataccagtttgggaatgccgcgaaaatggcgcctgcgccagtcaaaagccacacttcattcgcgtcccagaacggcccgatcgtgttgatcagcactctgcgttctaattcattatggccaagaaaacgggtcgccatgccgaccccgaaatcaaagccttccaaaaagaagaaacctacaaacaatacggcaacgagtataaaccaaagatcatgaagagatgccatggtatacctcctgactaaatggatctgttgatacaggaacatcatgatgatcactatgctccgcaccttttttaatctcacggataaacaagaagacaagcagtgcaccaagaatcaagtacatcacaccgaatgcgatgattgagaataacagggagcccgctgttacattaggcgacacggattgagcggttgtcattaaccccataaccgtccaaggctgacgtccgatttctgtcataatccagcccgcggagttcgcaagaaacgggaaggaaatcaacgcgatcatgatgcgcaaataccatttgctgttttcaagctttttgcggcggtttaaccaaaggccgcctaacgcagcaagaatcataacaacacctgctcctaccatgatgcggaagctccagaatgtcgttttcactggcggaatgtagtcgccttttccgtatattttttcgtactcagcctgaagggttttcatccctttgacacttccgctgaatttctgataagccaagtagctcaaggcataaggaactttgatttcatttgagcttttttcattttttgtatcgatcgtcgcaaaagcggtccaagcagcagggtcaccgctgtcttcccatagaccttcactggcagccattttcatcggctgtgattccatcaagtgctcagcctgcatgtgtccgctaaggccgacgccaagaccggcacaaagaccgacgatcattgcgagtttaaaagattgcttaaagaacggcacttcttttttcttcagcagtttaaaagcactcactccggcaataaagaaagctccagtggcaagcgcaccgaaaataacgtgcgggaattcaacccaaagctgagggtttgtaatcaacgcgccaaaatcattcatttccgcgcggccgtttttgatcgtaaaaccgaccggctcctgcataaaggagtttgctgttaaaatccagaaagatgacatgatcgttccgaatgatacgagccatatgcagagagcgtgaattttcttcggcaggcggtcccagccaaaaatccataatccgataaaaatagattccatgaaaaacgccaataatgcttcaatcgcaagcggagcgccaaatacatctccgacaaaacgggagtaatctgaccagttcagtccaaactggaattcttgcaaaatccccgttacaacaccgactgcgaaatttattaagaataagtgtccccaaaactttgccattttgagatacagttcatttttctttacaagataaagagtctccatcaacgcaaccataaacacaagcccgatagacatcggcacaaacaagaagtgaaacaacgttgttgatgcaaattgtatgcgggctaataccaattcactcatgctttctcctccatttccggttaaaactgttaatttgctcactacttcacaaatagaaccgagactttgatcagtaattcacaaaatagacgaaaaaaatattgttcaatatttcacaaatgtgtcaaaaagtcgtccaatatgagacaagattgccagactgaccaaatgacacaatctctgactggttcatattaagtactttacaacgattcatttcaaaaataaagcctaaaatacctaaaaagtcccgccctatgtgacggatttttgtctattttgttgcttatttatgtcggctgctaggataaatgaccctttattatcgtacatcaacacatcgttccttgcgaacaaaatgcttgccctgcaccagcactcgtttctcagcactccgtcataaacagattttaggcaggatgcctcttttcatttgaaccggcaagtggagaaaagttgaatagtaaatttttaatatattaataatttcaattttttagtatacttaacatagtgaacaatttcactgcatcaagaataggggaggtttttcaatgggagagcttcaaacacacatgcaattgcaaacggatacaattcacgaaggggttcgaaaagagaattggtttgcgaaagccatgaatataaaagtaggcatcataccgcttcctgtgtatgccttgctgtttatattaatcactgtttttgttatgcatcacgatgtaaaaagtgacattttgacatccattgccgtcatggcgtttttcgggtttacctttgcccaaatcggcaaatcgataccgattgttcgttctatcggcggcccggccatcctagctacttttattccgtccgctgtcgtgtactatcacctgctgcctaatgatatcgtcaaatccaccacagaatttacagaaaactcaaactttctatatttgtttatcgccggtattgtcgtcggaagcattctcggcatgaaaagagaaacactcgtaaaagcattcatgaaaatctttattccgcttattgtcggatctgtcacagccgctattgtcggactggctgtcgggacattgctcggactcggatttcagcataccctgctgtacattgtcattccgattatggctggaggagtcggagaaggcgctatcccgctgtccatcggatattctgacatcatgcccatttctcaaggggaagcgtttgcacttgttctgccatcgattatgctgggcagcttgtgcgcgattattctagcgggattgctgaaccgcatcggaaagaaaaaaccggaatggacaggcaacggcaaagtggaccgctccgaagaagagtcccctgcgctggaggaatctcaaagcggacaacaaatgttcaacctttctttatttgcgtcaggcggtatccttgctgtttctttatacttagtcggcatgctcgctcacgattttttcggttttccggcacccgttgccatgctgttactggctgttctaatcaagctgttcagattggtgcctgcctcaattgaaaatggcgcgtttggagtgtcccgctttttttcaacagctgtgacctacccgcttctctttgcgattggggtatccatgacgccgtgggacaagcttgtcgccgcttttaacctcagtaatattattacgattctgtctgtcgttgtgaccatgatggccgttggcttcttcactggaaaatggctgaacatgtatccgattgaaaccgccattatcaatgcgtgccattctggacaaggcggcacgggtgacgttgccattttaagcgccgctgaaaggcttgagttgatgccgttcgcccaggtatctacccgcatcgggggagcgatcacagtatccttaaccttattgctgctgcaccagttttattgatccccgcaagcaagttcttcgtcaaacgaaagagcttgcttttttgcatgtccatatttttgcaagttcccatcccatgctatagtaatagttggaaatactagatagaaaggaatctggcatgcctatgggaactcatctatttctctttatgcttctcgggctgggattttatttgatatcagccctagctgcaaaactcattccggccatagacttctggattgatattgttctatgggtcggcgctgcagtttacatcttctctcatctctcattcatggacggcattgtctcactcgcgacaatgttctactgctattggaccgcaatggatctcattgtttcagagcgtgtggaaaaaccttcgggagactggcaggaaatcgagctggccagaaacaaaacacgtctcctgtcagacattacgctgaccgccattgtgtttgcaggggctgttatttttttcatctatggacctgacccaagccctctcaaatatgtgatccttctcggcatgatctccggcggaggggcactggtgaagcgtatactgaatgttttcagcgtaaaggttttttattcagcagccttagaaaaattgcatatcagctcacactatgaaacccgtacatacccgctttccgatttgaaggacattcagcttgaatcaacagctgatctcttaaagctccatccgcttctgacgatgtattcatcacgtttagatttgacaacaagctttcagcaagtcattaaactgtctcttcccggcgaaacactgtttctgacggtgaaggaaccgcaaaaatggaaaacaattcttcaggaatacacagatgcaaaaaacaatgtggacaatgtgatttctgttttgccgttttatcatagaaaaaatgtgaagcggctgctcgggaagctttattttgccgccagcgtaaaaggggtatccgcttacgccttattggtgctcgcgttatacgcatcacacgcctctccatgggtcatggctgttgccgtaatcctatattgggtattcaacatgtatatgtcagaccgtgtgttgcgggcagcgatggacgccaagccttgtcatcatccgcatgtacaggcagcggccgatatgattttccgatcggccggcatttcccatgtccgcatatacgaaacggagagtgatgattacaacggaatggcagtaggcatgaatgtcgggaggtcaatggtcatcctgacaagcgccacactaacacttccacagcgtgtcatcgaaggcattctggcccatgaggcaattcatatcaaaaaacgtgacgttctgtcatcacagcttttgcgttttctatatcttggagctgtcgttgggattttcctcttgtttgagcagcatatcacccatcccgaggcccacaaaattgcgctttgggctttcattatggcaatcattatcctattccagctctatcaatccttttgttcacaatggatggaggtgcgtgctgacaaccttggcgcatccttgctggagggcggttacaaacaaatggctgaagccttgaaaatcttggcggttcagcaggatgaggacatacagaaacaaagtgcctacagctctgaagccggtgaagacgagcttcaaattgactctctcacccgtgataaaagctggtttttcagattgattgattttcagttcgctcctcatccccctatgtattggcgtgtcggcactttattgtcaaacaaaggacatggggtgctaaagcgctggctcagagaccgcctgaaagaatcgatcactttgaaatgaaaccggtcagcgtttcatccgtataacagatatggtgaaaaaagggagtgaccagaagtgatagtgatcttattgataatagctattattgtttttctttcagtcattcagccgcagccatcggataataaaatccgccagcaggcggacagcgggtatttcggttattcagatcatagctcgcaccatgatggattcggcagtgacggaggtttcagcgattccggctgtggcggcggagggggcggcgattaaacgccgcctttttttatttcattgattcgatgtacgcaccaaaagccgagcccgacatgcctggggacacgcgcacacgatggagggcatacattccctggtctctcgaagccgcgcccggttctgtcgtcacgcccatttgatagcctgttttttcagcggccttcagcgtctcctcattgtagcgccctaccggatagctgatgatggtggtttgctgatgaaacatgtggtcaaacagctttttcgaatccgccatctcactttgctgctgttgaggcgttaatccgttcagctcaaggtggtcaatcgtatggctttcaatcgatatgccgtgctgtgccatttccttcatttgttcctctgtcagatgatgcttatgtccgatcgatttgccgatcataaaaatcgttgccttcatcccgtactttttcagcaccggatacgcatcttgataattgtcggtgtacccgtcatcaaatgtgatcagcacgcacttctcactcggttttttatcctgcgtcagcatgagatatgcctctttcggcgttaatgtctgatagccgttatcatgaagccacttcatatgcgcctcgaattctttctttggcacacggaggctgtttcctgaagaaatgctgtggtacatcaaaatcggcagctttgccggtttctctgttttgatccatgcggatgtatcgtcttcttttttctgaacttgtactgcctttttttccggtttcttttgttccgcttttggcatcggctgctctgcattcgcctcttgatcagcgcaagccgcaagagccaaacagctgcccaaaagaaagatgcttaaaaacaatcgtttcatcgttctcctgctttctgtctatttcttcctcctttttcatcggtttgattctgagattttcaatagcaaaaaaccggacatgtctccatgtccggtttttttgatcctattgaattctcacttctgtctcactgtcaaagaaatggcctttattcatatcaaatgcaaccgtcagctcatcgcccgattgaatatcgaggcgggcgtcgatccgcgcaataaagtcttggttgtctatctgcgaataaatcataatttcagaaccgagcagctctgcaacattgattttcgccttaatcgaagagttcttatatgattccacgacaatcaattcatcatgtatatcctcaggacggatgccgaagatgacctctttgccgatgtagcctttttcacgcagcactttcatttttccttccgggacggttaatgccgcagaaccgattttgattaagccatccgtgagctttcctttgaaaaaattcatcgccggtgatccgataaacccgccgacaaagacgttttcagggaattcatatacatccttcggcgtcccgatctgctgaattttcccatctttcatgactacaatccgtgtcgccattgtcagcgcttctgtctggtcatgcgtcacataaatcgttgtagtctgcaatctctggtggagcttaatgatttccgcccgcatttgcaccctcagcttcgcgtccaggtttgacaaaggctcatccatcaggaacacctttgcatcccgcacgattgcccggcccagcgcaacccgctgtctctgtccgcctgacagcgctttcggtttacggtgcaaatattcctccagcccgagaattttagcagcttcctctactctttttttgatttcaggcttcggcattttccgaagcttgagcccgaacgcgatattatcgtagaccgtcatatgcggatagagcgcgtagttctgaaataccatcgcgatatccctgtcctttggcgctacatcattgacccgttttccttcaatataaaaatcgcctttcgaaatttcttcaagtcctgcgaccattcgcagcgtcgttgatttcccgcagccggacgggccgacgaatacgataaattccttatcggcaatatgaaggttaaagtcatcaaccgccggttccttctgatcataaaatttataaatgtgctccatccgcaattcagccatctaacatccccctttgttattgtaaacgctttcttatattgagtgtaacagcaattccctctcgctaaaatgggcagcgttcataaaatcatccagccatttttcgtgcatatttccaatttattctgaactttcattttgcaggcagataaaataggcaagaagcgcgcctttgtacgatttgatatctatccctgaccgctcaataaatttatcaatccgatattgcaggctgttgcgatgcagatgcagctttttcgctgttaatgtgacgtttgagttgttttcaataaacagcttaatggtcttccttagctcagcttcacttccaaataaaagctcagcttcttcagagagcagcgtttccagtttttctttttctgtttctaataatagaaaaggaaagatcatctcaaaggtcacactctgcacctgaggcagccgtttttcagcaaacaggaaatacgcctgttcacgagtgtaatgttttcgcagacactcatccggctcgtaaaatcttccggcgtaaaaacggacactgaagtagaaatcactttcaagaacttttgcgagcgattccagttcgcccttcttcgccgccgcttcactttcctgctcgacaatcacgcctctgtcctcatgaatccacacaatcacaaaagacaccggccaaaaatggcgaaccgcttctgtaaaggacgtcctttctattttgccgaataaatgaaagtgaacaaatctcgtccgtttctttatgtacgccggcaattcccctctggaaaaaaggaacgaaaaccacttgttttcctcaggtgatttcatagacagttgattgccctcatccgcaggcgtcaaaaatgattgcagcaccaatacttctttttcactgatctctgttttcggaatggagatatacctctgattgctctcatcaaaaaaacatagacagccttcccttatgcaaagctcctcagacacaatcgaaccgggataaatagccagcagcgatttcatagagtctcctctcttatgtaaggatctgtatattcagtataaggcgaaacacacatgttctccactaaaaaagagtatatccggtatagatagacgagaaactgaaagggaaacctcattcgtttacatattggcttcagcggaaatagaagaggatatgcaggaccaaaggagggccatcttatgagtttcgaaacgttaaacaaaagttttatcaatggaaaatggactgagggagaaagcggacgtacggaggacattttgaatccgtatgaccagtctgtgatcacaacagcatctttggcaacgggcaaacagctggaggatgcgtttggcattgcacagaaagcccaaaaagagtgggccaagagcacgacggaagaccgaaaagccgtcctgcaaaaagcgcgcggctatttacaggaaaaccgtgaagacatcattatgatgatcgcccgcgaaactggcggaacgatcattaaatcaacaatcgagctggaacaaacgattgcgattttagatgaagccatgacgtatactggtgaattaggcggcgtcaaagaggtgccatccgacattgaagggaaaaccaataagatttaccgccttccgctaggtgtcatttcatcgatttctccatttaatttcccaatgaatctatccatgagatccattgcgcccgcaattgcgctgggtaacagtgttgttcacaagcctgatatccaaactgctatttccggcgggaccatcattgcgaaagcgtttgaacacgccggtcttcctgccggtgtccttaacgtcatgctgacggatgtaagggaaatcggggacggcatgctcaccaatccaatcccgagattaatcagctttacagggtcaacagcagtcgggcgccacatcggtgaaatcgccgggcgtgccttcaaacgaatggcacttgagctcggcggcaacaatccatttgccgttctttcagatgcggatgtcgatcgtgctgtggatgccgcgattttcggaaaatttattcaccagggacaaatctgtatgattatcaacaggatcatcgttcatcaagatgtatacgatgagtttgtagaaaaattcaccgcccgtgtcaaacagcttccgtacggcgatcaaaccgatccgaaaaccgttgtcggcccgctgattaacgagcgccaaatcgagaaagcgctggagatcattgagcaggcaaagacagacggcattgagcttgcggttgaaggaaaacgcgtcggaaacgtgctgacgccgtacgtctttgtcggtgcggacaacaacagcaaaattgcccaaacggagctgtttgccccaatcgcaaccattattaaagctggcagcgaccaggaagcgattgacatggcaaatgatactgaatacggcctcagctctgcggttttcacttctgatttagaaaaaggcgaaaagttcgccctgcaaattgacagcggcatgacccatgtcaacgaccagtccgtcaatgattcgccgaatattgcctttggcggaaacaaagcaagcggtgtcggccgtttcggcaatccgtgggtcgtcgaggaatttaccgtgacgaaatggatttcgatacagaagcaataccgcaaatatccgttctaaatgaaaaaatccctctgtttcaagtacagagggatttttctttatttagatatatccacaaacccttcgccaaacacatcgcgtacgtcatgaacgatcacaaacgcttttttgtcgcagcttctaatgatttttttcagcatagacagctcctgtttgttaatgacgatatacaaaatctcttttgattggcccgtataatttcccttccctgataaaatcgtcacgccccgatccatcaaggtattcacctgctctgcaatctcactcttattttctgaaatgaccgtaatggcttttttcgtattcaaaccttcaataatgaagtccatcactttggtaccgatatacagcatcacgatcgtaaacatcattttttctgcaccaataataaaataagagctaaatactacgattaaatcaaaaaacaagagtgcatagctgatattccagtctaaatatttattagcaattctggccagaatcgcggaaccagccgtcgtcccgccgacccggataatcatgccgatcccgactccggcaaatacacctgcgaaaatcgtattaatgatcaattcatcagacggaatgctccacccatgtgtcagatgaagaaaaagcgaatttgccgcaaccgcaatgatcgtataaaccgttgtttttccatccagaaacttgtagccgattaaaagcaaaaacgcatttaagataaagttcgtgacaccaggagaccattgaaacagataatacaatatcagcgtaatcccagtgactccgccttccccaagatcattgggaatcgcaaataaattaaccgcaagcgcgaagaaaaaagcgccaatcacaagcataagtacatccagcattctctttttcatcacgaaaacactccttctcattgttctgttctactagcaaataaaaaaacccaggagaacgctctcgaaaaagagcagaaactcctgggcttttatcccaccgtgtcataacagccaatctgctatgtgttttctctcggtcacagtccaatttgcattgcggaaccctagaaaaccactgtttttatcatatccttttcactttccaatattagcattataagggacggttcgaattggttcaaggggtatttgcggagttttcatcagataagctggaagaaaaaacgatttatctattaaaaaagaacagatataaccgataagaaaaaaagcatatattttacaagtaaatgtaactataaatgataataattatgagaaattcataattttatattgactaagtgaaataatataggcattatagtacatatgtttcgtacattttattacataggaggaaatataatggcaggaaaactagtaccctgtaaagcttgcggtcaagaaattgcaaagggtgtaaaaaaatgtcctaactgcggtaaggatcaacgtaacttttttatgcgacataaaatcattacgtttattctcgcagttgttgtcatcattattatcggtaatatgattggcggcggaggcggttcagaagccacttccaaaacatcaagcggaagcaaagcagaaactgaaaaaacatacaatatcggtgatactgtaaaaactgaaaaaactgaagtgacagttacgaaggtagaggacagagatactgtcggtactcaatatgttgaaaagaaagcatctgatggtggtacaattgtagctgttcaatatacaattaaaaacgtatctaaaaagccaataagttctttttcaattccaactgttaaattagttgatgctgatggtacttcttatgattctgatattgatgcttctgtaaactatgcaactgagacaaaagttgataactctaaaattttgagtgatctaaatcctaatattaaagtaacaggtgtaaaagcatttgaagttgacaaggaagcttatgcaaaaggcacttggaaactaaaattcagtaatgatgttattgtgaaaatcaaataacagctaacaagggtgcctgttcaggcacccttgttctttaaaggccttctctattgagaaggcctccattcttattccgcactcttatacccattcacattagaagactgccatctccaggaatcagcacacatttcctcaaggccgcgtttcgcttcccagcccagttcccgcttggctttcgcaggatctgcaaagcatgtggcgatgtctcccgggcgacggtccgcaaaacggtacggaacctctttccctgacactttttcaaaggctttgaccatttcaagcacgctgtagcctgtgcctgttccaaggttgtatgcatcggctcctgtagagttcaatactttttccagcgccttgacgtggccttctgcgagatcaacgacgtgaatataatcgcgtacgcctgtcccgtcttttgtcggatagtcatttccgaatacgcttaattgctcaagcttcccgactgctacctgtgccacatacggcataaggttattagggattccgttcgggtcttcaccgatccgtccgcttggatgcgcgccgaacgggttaaagtaacgaagcagcgcaacgctccactcattgtcggctgtatgcaaatcacgcaatatttgttcaagcatgagcttcgtctgcccataagggtttgtcgcacctaatggaaagtcttccgtaatcggcgatgtttccggaacgccgtacactgtcgcagatgaactgaatacgattttcttgacgccgaatttctccatggcctcgcataaaataaacgttcctgtcagattgttatgataatatttgagcggaatcgccacagattcaccaactgcttttaacccagcaaaatgaatcacagcttcgatttcattttcagcaaaaaccgcatctaccgcttcccggtccaataagtccgcttcgtagaacgttaaatcttttcccgtaatccccttgacacggttcagcgcctcagccgaactgttggacagattatcaagaacaacaatctcgtagccgctgttcaataattcaacacatgtgtggctgccaatgtacccggcaccgccagtaacaagtattgccatgatgtaaccctcctaaaaaatgacctgttttcattatatagtgtttaaaaccggtccacatccatttttaagaagtttaatcgtttattaatagttttttcatatattatcagcattttcatacctttatgcagcgtgaacaagtatagcagctgaaaaatcaatctgccggttgacgtttttctttccctttttcgctatgcttaatgtagaaaggatttgatgacatggcgatgagcccatatatttttattgtattgattcttattattttatcgatgtaccgagagagagctgtcagacccgggaagttgctgatcattccgctgctgctcttatggggcgtatcagcatcgtttcagccggcgtattttcattccgtattacatgtggcgatcagcggcattttattattaatcgggctggcctgcgggtttggcattggaaagatggtaaacgtgcggattcacccggaaaccggaaaggtcacttcacgcggctcacttgggagtgttatcctcattctagtgatactttctttgcgcatggccgcgagaacatggctgcctgagagcaacgagatgtttattgccattattcattctatgttcttcattcccctcggcaccattacagcccgtaacattatgctttataaagcatacagacggctgaccgctggcaaggtatccattcaataactgaaagaaggaccagcatgaacagacaaactccggctcggcactactacaagaagcttgtgccgagccttattctcattttgaattgcatacaatttttatctcacccagccaaagctgatcccattttgttggcatttgtatttgcggtgtacttagcattcatttgggtcattccctatgtggcatccactgctgttagtttgtgcatattcatcggactctggctcctgaccgatttcttttgggctgtttccggccaagagcagggtgccgcctattttttgattgtatttttaatgatatatgccgcctttagactcccttcacggctatccttgatcttcacagcatgtttaattggaggcaacatattactcctatcctcacaagggggaagcttgaataccatcatcagcaacatctcgatcatgctcgggctgtacgtcctcttctcctccatgcgtttcagacgagaagcgagaagggaggctgaacggaatcatgctgaattggcaaaaatgcatgtgcagctggagcatgctcataaagaactccagaaagcgcatgcagagctgcaggaggcttctgttctttcattaaggtacgcggtccttgaggaacgtacaagaattgcccgcgacattcatgacagcatcggtcacgagctgacttctgttattgttcagcttcaatcccttccctatatccttaaaagcagcaaggaggattcagaaaaagtcattcaaaatgtactgagtgtcgccagggaatgtcttcaagaagtacggtctgtcgttcaccaaatgggccgtagtgaatcgatggtggggcttaccgctttgcgggggctcattcatcaagtggaggaacggagcggcttgcacgtttctttagatactgccggactatcagaagagtcttggcctccaaacgtgagcgaaacgatctaccgcatcttgcaggaagcgctgaccaatatcattcgtcacgctgacgcttctcatgcggcggccgtcatttctaacgacaagtcccatctctatatcacaatcaccgacgacggacaattcaccggcagccttacttatggatttggcctgacaggaatgaaagagcgcgcagaaaaagcaggcggttcccttactttcagtgccgtacagccgagcggcctgaaaattgagctgtcattgccgctcatgacaacgaataaggagcaaaaagatgaacaaagataacatacgcgtcgcgcttgccgatgatcagccgcttgtgcgtgaaggcttccgctacgtcatcaacgcacagacggatatgacggtttctggcgaggccggcgacggtcacgatattatagcactcgcaaaacaaacaaaacccgatgtcatcctcatggatgtccagatgccgcgttgctcaggcatcgaagcagcgaaagacattatgtccgcacttccagatacaaagatagtcattttaaccacctttgacacggaagaatacgtatttgaaggcatccgtgcgggagcagtaggctatctgctgaaggatacacttcctgaagagttgatagatgcgattcgcgctgcggccagaggcgaggcgattttccgtacagtcacagctgctaaaattatcagtgagacatttcaggcgaagcaacagccccatccagaagaactggcagagccgttcaccaaaagagagcttgaggttcttcagcaaatggcctacggactgagaaatgaggatattgctgaaaagcttttcgtcagtgaaagcactgtgaaaacccacgtgcaccgcatcctgcaaaaatgcaatgcccaagaccggacacaggcagtcgtttttgccattcgaaacggtattgtgcaatagaaatctctcatcccgccatgctaaaataagacaaaggagatgattggaaatgaaagaagaaatcattgaacggtttactacatatgtaaaagtcgacacacagtccgatgaatccgttgacacttgtccttccacacccggccaattgacattaggaaacatgctcgttgatgaattgaagtccatcggcatgcaggatgcagccattgatgaaaacggctatgtcatggcaactcttccctccaatactgaaaaagacgtgccgacaatcggctttctcgctcacgtcgacaccgctacagactttaccggcaaaaacgtgaatccgcaaatcatcgaaagctatgatggaaaagacatcgttctcaacaaacagctgcaggtcaccctgtcacctgatcaattccctgagctgtctggctataagggccatacactcatcaccacagacggcactacccttctcggcgcagacaataaggccggtatcgctgaaatcatgacagccatggattacctcatcaaacaccctgaaatcaagcacggcccgatcagagtcgcctttacgcctgatgaagaaatcggaagagggccgcacaaatttgatgtgaaacggttcaatgcttcctttgcctacacggttgacggcgggccgctcggcgagcttgaatacgaaagcttcaatgccgctgccgcaaaaattacgattaaaggcaacaacgtacatcccggcacggcaaaagggaaaatgatcaactctgcgaaaatcgcgatgaagctgaacagcctgctgccggcagacgaagcgcctgaatatacggaaggctatgaaggcttctaccacctgctgtcgattcaaggagacgtagaggaaacaaagctccactacattattagagactttgacaaagagaatttccaaaacagaaaagaaacaatgaagcgtgtcgttgaagtacttcaaaacgaatacggacaagacaggattctgctggatatgaacgaccaatactacaacatgagagagaaaattgaacctgtcatcgaaatcgtcaacattgccaagcaagcgatggaaaacctcggcatcgaaccgaagatttctcccatccgcggcggcaccgacggatcgcagctgtcctatatggggcttccgacgccaaacatctttacaggcggggaaaatttccacggcaaatttgaatacatctcagttgacaacatggtcaaagccgtaaatgttatcgttgagattgcaaagcagtttgaagcgcaagcctaatgccaaaaaaccagtccaaaaaaggactggcttttttgtgtgaaagtgaaacattttaaacgcgtcctccgtaaaacaagtattaacaaatgaggaggaaaaacaatgacaaaacatgcaatcgctgcaaagagtctcttgaaaaaatggatcatttccaggccgcttaacatgcaaaagaaatccagcccatttcaaaaaatcagaaaaatgttcaaacgcttcttcaaataaaacattcaaatcccctaaatacaatccgtattcacccgtaccgcccaaatgctccgtaatttgggttttttgtgttcaattccgcaaaatagggtataaaccaaacaagcaagaaaacagcacccaaaaacaggtaattcgaattacgtaaacttaggttaaaagttatataaaggaatttattttatcgtcgatagtaactatagaaccaatcatcaacgagagcaaacagcgtaattcaagactattttcaggtcatcaggtaatactgttttagagggacagtttcttgttatttattgatttagaattttttgaatactttttggcattttatccgtacaatagagagtaccaaaactttttttgggaggtatgtaatatgatcctatttattatcatcgcattatgcggctatcttcttttttctttcagcaaggacaatcgccgcaaaccgcaaaagacaagccctctgccagcagccgcacctcatcacaacaacctaatcgaccttgacgccatccgccaaaaacgccggatgcatctttcctaattctatatttcaaacgaaaaggctgctgaatcacgcagccttttaaaattgttttgatttagagcctgaaaccttttcgccacatatccgtaatttcatacaaggcaaacccaaaggagacttcagcaatgatcgagttatttatgaaacaaaaaatgttctcatttaaagatgcatttcacatttatgaccgggatgaacaagaaacattcaaggtggaggggcgttttttctcgttaggagactcattacaaatgacagactcatctgggaaaacgctcgtttccatagaacaaaaactaatgtctttattgccgcgctatgagatttcaattggcgggaaaacagtttgtgaggtaacgaagaaatgtaacgtttttcaaaccgaaatttgtgatttccgggcttaactgggaaatcgatggtgatttatggagggatgaattccagctgacggacggggaaaatgtccggatgtcagtgagcaaaaagtggctcagttggggtgattcctatcacttgcagattgcaaacgaggaagatgttctgatttgcactgccatcgctatcgtgcttgatatggttttatataacgatgaagatgaaggtattttctaaaaagcattgacaattgatccaaaagtaataatattaagataattgaaatctgaatatgaagttataccttatcaagagaggtggagggactggccctatgatacccggcaaccgctgtttcaaacagaatggtgctaaatccttaagaacattgtgttcttgcagatgaggcggagatttgatcgttcaagctcttccttacacaaaggaagagctttttacatgctcaatatttcagaaaagaggcgaataacatggctcaacaaacgaatgttgcaggacaaaaaacagaaaaacaacgcaaagcacctttccgcgccgatcatgtcggcagcttgcttcgttccgttccggtaaaggaatcccggcaaaaaaaagcggcaggtgagatgacagcggaacagcttcgtgatatcgaaaatcaagagatcacccgcatcgtggaaaaacaaaaagaaatcggtctcgatgtggtaacagacggggaattccggcgttcctggtggcattatgacttcctggaagggcttgacggtgtggaaccgttcattccggctgaggggattcagttccataacacaaaaacgaaagcgcgcagcatcaaagtgacgggaaaactcgattttacgagccacccagcgcttgctgattatcaatttttacatgagattgccggtaacgcgacgccaaaattgaccattcccagcccaaatatgctgttttttggcgaaaaggcggataaagggatttatgacgatcaagaggaatactttcatgatctggcccaagcgtacaaaaaagcaatcaaagccttctatgatgctggctgccgttatctccagctcgatgatacgtcatggtctctcttctttgaggaaaaaggcagagaggttgtccgggcgctcggcggcgatccagaaacattgccagccatatttgccaaaacaattaacgatgccgtcgcagaccggcctgacgatttaacgatcacaatgcacatttgccgcggcaacttccgctcaacctgggcggcatcaggagggtacgacgctgtagcggaaacgattttggacggcttaaaccttgacggccttttcttggaatacgatgatgaccgctccggaaactttgatccgctccgttttgtgaagcgcaaggatctgcaaattgtgctcggcttgatcacatcgaaatacggcgagcttgaaaatcctgaggatgtgaaacgccgtatcaatgaagccgcgcgttttgtcagcttggaccagctatgcctgagcccgcagtgcggtttcgcctctacagaagaaggcaaccttctgacagaggagcagcaatgggcaaagcttcgccatgtcatcgacattgccaacgatgtgtggagataatctatcattgacagaaatagaaaatgtgtgaataatagatactatcagaaaatttcataaaaaggttttccttatcaagagaggtggagggactggccctgcgatacccggcaaccgctgtttaacagaatggtgctaaatcctttagagcaatgattgctcttgaagataaggttgagattgtcacgcaagctcttccttatccaaaggaagagcttttttacatttgaatggaaagaaggaatggacaacatgtcacaacaaacaacacccgcagaacaaaaatcacttcaaagaaaaaaaccgccgtttcgcgcggatcaagtcggaagcctgttgagatctgagcccgttaaaaaagcgcggctgcaaaaagcggccggcgatattacggctgagcagcttcgccagatcgaaaacgatgaaattatccgcattgtggaaaaacagaaggaaaccggcctgaacgtcgtgacagacggtgaattccgcagagcatggtggcactttgatttcctggaaaacttagatggcgttgagccgtttactcctgagcaaggcattcaattccataacgtacagacaaaagcacgcggcattaaagtcacaggtgatatcgacttttcaactcacccaatgcttgaagattactcatttctccatagcattgccggtgacgcgacgccaaagatgacgattccaagcccgaatatgctgtttttccgcggaaaattggaaaaaggtgcatacaaaaacgactatcaccttttccagcatgatgtatccaaagcatataaaaaagcgattcaagcgttttatgacagaggctgccgctacctccagcttgatgatacagcgtgggccgttttcttatctgaaaaaggcttaaaacaaatcgaagcgttcggaacaacgcctgacgagcttcgccagctgtttgcgaaatcgattaacgacgcgattgcagaccgcccggatgacttgacggtaaccatgcatatttgccgcggcaacttccagtccacttggacagcggaaggcggctatgacgcagcagccgaaaccatttttgacggcttgaatcttgacggacttttcttagagtatgatgattcacgctcaggcggatttgagccgctccgttacgtaaaacggtctgatcttcagcttgttcttggcttagtgacatctaaattcggtgagcttgaaaatccggatgacgtgaaacgccgtatcgaagaagcgtcccgttatgtaagcttagaccagctttgcctcagccctcaatgcggatttgcttcaactgaggaaggcaacaagctgactgaagaacagcaatgggcgaagctccgccatgtggttgagatcgctaatgatgtttggaaataagaaaagaaaaaacacacttgattccctagcggagcaagtgtgttttttatgtcattgtgcggtgtagcccccatcaaggacgacagcctgcccagtgacgcccttcgccttctcgcttgccaaaaacacggcataatccgcaatttccttgacggaaagcagtcgcttttgcggcacaagcggaaaaatgacttgttcaagtacagagtcgtaagggacatttctagttttcgatagatcgctaagctgattgcgtacaagctgggtatcgacataacccggacagagcgcattgactgttatgccgtggggcgcgccttccagcgcccctacttttgtgagtccaatgacgccgtgcttggcgctattataagcggatttccctgcaaagccgactaatccattaacagacgcgatattaatgattctgccaaactgctgttttttcatgatcggaaaaacatgcttcattgcaataaagggggccgtcagcatgaccttgatcagctgttcaaaggtgtctgtcggaaactcttcaatcggagcgacgtgctgaataccggcattgttcaccagaatatccaagcggccgtattgtttttggatgacgttcaccgtatcagcaacttgcgcttcctttgtcacatcatacggaatggccgccgcgtcaaagccttcttctgcaagcttggaggctgctttttcacatgcttccggacggaggtctgaaacgatgacgctggcaccttcccgggcgaattctcttgcgatttcgaatccgattccgccggcagcccctgtcaccaaagcgacttgttttctcatgtcaaacaccttcccattaagaattgagtacagactggcttacagcgaaatcagcttctgttttttcataaacctcttcaattgtgacaccatcctgaagctccgtcagtgtcatgcggccgttcacaaaatcaaatacagccaaatccgtaatcagcctgtgtacgactttctggcctgtcagcggatgagagcatgtttttttcacctttgattcaccatgcttattgacgtgctccatgatgacaacgattcgtttcgccccgttgacgagatccatggcgccgcccatcccttttaccattttgccggggatcatccaattggccaaatcaccctgctccgaaacctccattccgccaagaatagccaaatcgatatgcccgcctcttatcatcgcgaatgactcagcgctgtcaaaataagaggcgcccgtcacttcagtgatcgtttcctttcccgcattgatcaaatccgcgtcttccgttccttccagaggataggggccaattccgagcaagccgttttccgactgaagcatgacgtgaacgccatcgggtatctcatttgcgacaagcgtcggcattccaatcccgagattcacattcatgccgtccttgatttcttgtacagcccgtttgaccattcgttttctcgcttccttcacttggcctcaccctttcccgatgcttgctgaactgttcgtttttcaatccgtttttcttggctcgcgccaagcacgacatgctgtacgtaaattcccggcgtatggatatgatctggatcgagctctcctgcttccacgatttcttccgcctcggcaatcgtgatcttgcctgccatggcggcaatgggattgaaatttctcgccgttttcctaaaaaccaaattgcccatggtgtccgctttccacgctttgacgatcgccacatcgccggtaatgcctcgctccagcacataagtccggccgccgaatgttttatgttcttttccctcggctatggaggtgccgacgcctgtcgccgtataaaatcccggtatgcctgcaccgcctgcacgaattctctcagcgagcgttccttggggaacaagctcgacctcaagctctccgcttaaaaactgccgctcaaaaattttattttcaccgacataggaagcgatcattttcttgatttgcttgttagccagaagcaaaccaagcccccagtcatcgactccgcagttattgctgacaacggttaaatcctttactccctgatctcttatagacaaaatgagctgttcagggatgccgcacagcccaaaccctcccgcgatcagcgtatccccatcatgaatcagtttcgcagcttccttgcttgatgacagcactttttccatattgatgcccctttcgttttcttctacactagaccagtcaggctgtaaatcgcgatcacagcaaatacggcagccgttttaatgagcgtgatcgcaaaaatatcgcgataggattgccggtgggtcaaacccgtcacggccagaagcgtaataacggcgccattatgcggcagtgtatccatcccgcctgatgccattgaaatgacccgatgcatcacctctggcggaatattgtaagcctgaatcgcctgtaagtattgttctgacatcgcgcttaacgcaatgcccattcctcctgaagccgagccggtgattcccgccagcgcagttgtcgtaacggcgccatttacaagcggatcggtaaaagtatgtgaaattccgctgctcagcttatgaaaccccggcagtgcggcgataatgccgccgaacccgtactcggcacccgtattcatagatgccagcaaggcgccgccaattccttcattcagcccttccttcaattgggcaaacacacttctccaatcaaataaaatcgttgtgatgatgccaatcactaaagcaatctccaccgaccaaatagcagctgctgaagaaatatcaagcctgccgaactcctttaatcctatggaagaaaaatcaaatccattcggataccactttggcaggtaaatggtaaaatatttattcactgcaccgacgagaataagcgggacaaaggcaagcgcgtgccgaatcgggcttttgtccggttcagccgcggactcaatcgattcaggagcaggagcattctgcgaatcaaaaccgccatagccttcgccagatgcctgcgcttttttccgccttgattccaaatagagcatcccagctgccagcacaatcactgcgcccatcaagcccagccaaggggcggcataaatgtctgttttgaaaaacgacgtcggaatgacattttggatttgcggcgttcccggaagtgcgtccatcgtaaacgtaaaagcccctaaagcaatcgttcccgggatgaggcgttttggtatgtttgcttcttggaacatgtttttcgcaaaaggatatacggcaaatacgacaacaaacaggctgacaccgctgtacgtcaagacagcacccatcagcacaatggcaagtatcgctctttttgccccgacaagccggacaattgttttcgcgattgatgccgcaagcccggccatttcaacgacctttccaaaaatggcaccgagcaaaaacactgggaaatacagcttaataaaacccgccatcttctccataaaaattgatgaaaaaaaaggaagcacatggcttggatctgtcaggagcaccgcgaataacgcgcaaatcggcgcaaacaatatgacagaaaatccccgatacgccgtaaacatcagcaaacctaacgccaatagaatgatgatcagttccacacacacatcccccgtttccgcgaactagaaagcgtttacaaaaacctgtccgcatcggctgtttccgtcccctttccatatgtacgagaagcgtgggccaactattccgattaaaaaaggaaagctccttttttcggagctttcctctgccattcatttcattcctattaggatatcaacatcaaccgtaatatcggctgttttcatctctttcaggaggctgactcgatctttcggcgccgaccaggcaagcggcgtcatcttgagaagccagtggatcgcctgctggtcaagcgttttaacatagcgcagcctgacaggacggctgtgtgcagcatttgctgcaaaacgctcaacagctgccgcattggaatacgtgcgccttggtgaatcagtatataaaaattgccttaattctattaaatagtcgcttcgcggcactacttttacgagcatgccatcattcttcagcagtctatgaaactctgcataattggacggcgaaaaaatagacagaacaacatcaaattggcgatcatgaaaaggagcacgcgccacatcggcaaccgcccacatctgatctttgaatgccttagaagcttttaagatcccatccttcgaaagatctatgccggttcctatcgctgctttccctgcataatcaaacccgcaaagcgcattcaaatgagaaccctcaccgcaaccgctgtccaggatggtgaatgcctcatgaccagatgtgggatgactgatgagttctgcaatcgcatcatggagcgggtcaaaaaaaccacattctccaatcagcctgctcctcgcttcaaaaagctcggcaccgtaactggttttgaccggcttcgtcagaaagttcacgtagccgtgccgagatagatcaaatgtatgtcctcgttctgtacaaatcaagcttttccctgatgccgcatccatagaagaatcgcagagcgggcatcgaaacatgctgaaatcaactgttcgcttcatgataaaaaacaccccattcattcatttttagataaatgaaaaaggcatagacaaataaacctaggcctatctcaaaaattggccaggtctggcagtttgtctacacctgtcattatctataacgaatgaattggataatcatgaaaaaactccctttctgctgtatgggtttccccatttccattatacaacaaatctccaggatctggaaccttatagtgaagaaaaatcagtactgacatgctggtatcccgccaacatcatatcagcatagcaatccagcatgtttttcctttattttctcattttagaatataaattttattattgtgaaaatagttaaaaaggttgattttcaaaaagtgaaaggataaaatactgctatcatcttagaaaaagacattcttgtatatgatcagtaatatggtctgattgtttctacctagtaaccgtaaaaaactagactacaagaaagtttgaataaatttgaacgagttgaaaaggacaagttcttttctgtttgctcttatttttcacactttctgcacttccagaatttgtgaagaataagagctttttttgtttccataataaccctcataggagttgctatcatgtactttttactaaaccttgtcggtctcattgtgattatggcagttgtattcctatgttctccgcagaaaaagaaaatcaagtggcgcccgatcatgacgttaattgttctggaattgctgattacttggtttatgctgggaacaaaagtcggaagctgggccatcggtaaaatcggtgatttcttcacttggctgattgcttgcgctagtgacggtatcgcgtttgcctttccgtcagtaatggcgaatgaaacagtagactttttctttagtgcgcttcttccaattatctttatcgtcacattctttgatattttaacgtatttcggcattttgccttggctgattgataaaatcggatgggtgatttcaaaggcttcccgcttgccgaaattagaaagctttttctctattcaaatgatgttcctgggaaataccgaagcacttgcggttatccgccagcagctaacggttttaagcaacaaccgcctgctcacattcggcttaatgagcatgagcagcatcagcggctccattatcggatcttatctttcaatggtgcctgcgacatacgtgtttacagccattcctttgaactgcttaaacgcgctgattatcgcaaacctgctgaatcctgttcacgtgccggaggatgaagatatcatctatacaccgcctaaagaagagaagaaagactttttctctacgatttctaacagtatgcttgtcggcatgaacatggttatcgttattttggcaatggtgatcggatatgtcgcattaacgtcagcagttaatggcattcttggcgttttcgtacatggcctgaccatccagacaatttttgcttatctgttcagtccgttcgcattcctgcttggactgccagtgcacgatgcgatgtatgttgctcagctgatgggcatgaaattagcaacgaacgagtttgttgcgatgcttgacttgaaaaacaatctcaaatcccttccgcctcacaccgttgcggtggcgacgacattcctgacgtcctttgcaaacttcagtactgtcggcatgatttacggcacgtacaattcgatccttgacggagaaaagtcaacggtcatcgggagaaacgtgtggaaactgctcgtcagcggaattgcggtatctttattaagtgctgcgattgtcggcctgtttgtgtggtagaaacattgagccatatcccttttcggatatggctcttttcattattgataaatagaggctggcacctgcacatcccggattcccgctgcataaggccccaagtcatactggccgaagacgatggcgatcccgtttgccgtaaagtaaaacattgtgtctctgtttagggttatatcctctttctttacatcagggaaaaacagctcatcgtgttttttgatatagctatataggtaatctctcgttttgctgacttttgttttggtgttcagaatctgatccagcgtcacccgcttttgtgctttcaagtcatagttgaaggactggacagacgttaaaccgtgggcgccccctgaatagatataattgagtgtttgaatgctgagcttgcctgccgcattgtatttgacgctaaaggatgtttgatattccgttttaaagccctgctgttcgcctgcttttttgtttttcaggtattcctgatacgattgttcaatgtaggctttcagctcttgattgattttcttttcaaacgcggcattcccgatgtgatgcacttgtggatacgttaactccttgatctttttgtacgtatgagtgctgacagtcggtgttttcgtttgaactgcgtttagagatggggccgcatatgcaactacggaaaaaagcaagactgcaatccccgcggctttcatcattttattccatttcatacaatctcctcctttgatgtcgttgtttatcattcccttatttaagcaatacacacttttatagactgattaaatcgaaagaagtttctaggtctaacagcatgatttttccaataaaaaaagagacacaggatgtctctttttttactgtttgcgcccaaaaatcgcttcatgaacggcctgtgccaaatctgtatttccgaacatctctaataccgcaatgacagtctggtccggaatgtgctctgcttcgtgttttggcacgaccagatcgtccatggtttttttcaagctttcattcagcttttgctgcggatacgctttggtgtacatctccaccggatcaagatcatggttcacgcaccattgggcaaacaccaaaatcatcatattttcatcgcgttcgtaagcttcagcgagctgtttttcgttcatttgtcatgctccttatgaaaagtatcttccttaaagatacaggagccgatcaaattcgtctatcccaatggcgatgagcagaaaccgcatcgataaatgccttgctgaaagcggtgtagtcaggttcatctttagccgttacgatgcctggcccctctgttgtcccgacagaggattgaagaaggtcaattccttcatttgccgcaccgatcgccttgtagtgattgtaagcttctctgataaactccatcgcttgtttgttgtcttttaactccggccctcctgcggcatagacggcatcatacagaacagaatcaaccgtcaggaacgtgccgctggcctcaagctgctgtccgctgccgcttgtcatataccccagattttgactgatgatatctactgtgattccttcttgctttaaggcttccagcactgtttgcagctctttttcatgaaatccgtttccggtgagtacagcgacttttcttgttgacgcggttttcactgtacgggcttggcttaacgcaggcgaagtaagaatttctttagatgctttacgcttcgcgggcgccgccacgcctactcctttggcgatttcttctgctaaatctgcatcgacattgctgaagacatcaacaacctgccgctgtacgtctttgcttttgaccttcccgacctcgaagcagaaagcagaaatgatgtgctgtttctccacaggagacatgctgttccagaaaagcttcgcctgtgagtaataatcgttgaagctgtcgcttcgctggcggatttttttgccctcgactttttcctgatagtggacgtagccgccttcttcagctgtcgcaggcgacggatcattgttttgcagtgagtttttatgataagcgacaggccccttattgatcgtcatccgatgataaccgtcatattgattgttatggaatggacataccggccggttaatcggaagctcatggaagttcggaccgccaagacgaatcagctgtgtatccgtataagagaaaagtcgcccctgcaatagagggtcatttgtaaaatcgatgcccggcacgacatttcccgggtggaatgcgacttgttctgtttccgcaaacacattatccgggttgcggttcagcgtcattttcccaatgatcttcaccggcacaagctcttccggccacagcttagtcggatcaagaatatcaaaatcaaacttgaattcatcttcctcatcaatcatctgcacgccgagctcgtattcaaccttgccgccgttttcaattgtttcccacaggtcacggcgatggaaatccggatctttcccggcaattttctgcgcttcatcccatacgagagaatgcacgccgagcaccggcttccagtgaaatttcacgaaacgtgcctttccttgttcattgacaaaacggaacgtgtgaacgccgaagccttccatcattctgtagctgcgcgggatgcctctgtctgacatcgtccacatcaccatgtgagccgactcagggttattggcgacaaaatcccaaaacgtatcgtgagcagtcgctgcctgaggcatttcattgtgaggttcaggcttaaacgcatgaaccaaatccggaaatttgattgcgtcttgaatgaaaaacaccggaatgttatttcccacaaggtcatagtttccttcttcagtataaaattttgtcgcaaagcctctggcatcccgcaccgtgtctgcggagcctttagaacccgcaaccgtagagaaacggacaaataccggtgtcttcaccgaagggtcctgaagaaatttggcccgtgtatattccgtcattggttcgtaaacctgaaaaaagccatgcacgccatacccgcgtgcatgcacaacgcgctccggaatcctctcatggtcaaagtgcgtcattttctcccgaaagtgaaaatcctccatcagcgtcgggccgcgaaccccggcttttaacgaatgctcatcctctgatactcgcaagccttgatttgtcgtcattttcttcccgctgttatcggtcctgtactgctcaagctgctcgtcctttgagtgttcatttacacgtttgttttggtcatcactcatgtctgctcccccttttaaaacgaaacattctacagcacatttacccgtggcgttcttcatataaactgctaatccgctcattaggatttttggtctacatataaatatgcggtcatacacatttgaaataagccttcttcacagaaagaaaggatggaagcgcttaccaaaaaagctgttgaataggggaggtcatatcatgcttgccatactcggttttgtgatgatgattgtctttatgtaccttattatgtctaaccggctttccgctcttattgctttgattgtcgttcctattgtgtttgccctgatcagcggatttggcaaagatctcggcgagatgatgattcagggcgttacagacctcgcccctaccggtatcatgctgttattcgccatcctgtatttcggcattatgattgactcaggcctgtttgatcctctcattgccaaaatcttatcgtttgtcaaaggagatccgttaaaaatcgccgtaggcacagcggttctgaccatgaccatttcgctggacggagatgggacaacaacctatatgattaccattgcagcgatgctgcctctctacaaacggctcggcatgaaccgtttggtgttagcgggaatagcgatgctcggttcgggggttatgaatattatcccgtggggcgggccgactgcgagggttttggcttccttaaaattggacacgtcagaggttttcacgccgctgattcccgctatgatcgccggcattctctgggtgatcgccgttgcttatatcctcggaaagaaagagcggaagcggctcggcgtcatttcgattgatcacgcaccgtcttccgatccggaggccgcaccgctcaagcgtcccgctcttcaatggtttaacctgctgctgactgtcgctctgatggccgcactgatcaccagcctgctgccgctccctgttctttttatgactgcgttcgccgttgccttgatggttaactatccaaatgtcaaagagcagcagaaacgaatctcggcgcatgcgggtaatgcgttaaacgttgtctcaatggtgtttgctgcgggcatattcacaggcattctctccggcacaaaaatggtcgatgccatggcgcattctctcgtttcactcatccctgatgccatgggcccgcacctgccgttgatcactgcgatcgtcagcatgcccttcacctttttcatgtcgaatgacgccttttacttcggtgtccttcccatcatcgccgaagccgcttccgcttacggaatagacgccgctgaaatcggaagggcctccttgctggggcagcctgtgcatctgctcagcccgcttgtgccttccacctatctattggtaggaatggcaggcgtcagctttggcgaccatcaaaaattcactattaaatgggccgtaggaacaacgattgtgatgacgattgccgcacttttgattgggattatttctttctaaatgtatgagcttgatcgtagcattgagtgagtacgtgatttacagaggggagaagatcaaataggatattatgagtgaatagaagattcatgccaacaacttctcattacaatcataagagcctgctatattgcagcaggctctttcacatttggcattatttttttgtatagcgcacccagtcataatgagcgtatagcggatttacaccattgtaggaaccaagccattcatcgacacccgtgccattccacaagttcatcatgatctttccaggtgttgtcggaatttggtttgttgcagtatgttttaattgcccgtcgacataccatttaatagagtttggctgccaatcgaatgcataagtatgataggcattggctgcatcaaacccgagatcaacaatcttctcatggtttcctgcaccatttgtataatagttaaattgaaccttcgttgtgtcttttcctaaaaattcgatatcaatctcatcccaaggagttccatctgttggacctgtgtaagtgaagaacgatgaaacgatccctgtgtttttagctggtttcattctgacttcataaagtccatagccatatgtttgaacagaacggttttccccgcagtcaaacttgttataagctgggcttgttagcgctaaacgcatttcacccaatgacgtcattgatacgttattagcccgccacgtgcagttgaacatatttccattcgaataaccatctgctttttgccaaaaaccggagttatagccgttaaaagggtcaaaaaacgatccacctgtttgagctgaggcagtagaagtgactgcaaacaaactcataaacaatccagtgacaagaagcagcaacactcgtttcagataaggcatattggcattcccctttcattgaaagcgttttctatgttgatcttacatgattcttttaaaagggaacatcggtcaaaataatgataatatcgaatcttactgacttgaatcctgtaactatcatcatcttccctctgaaaaaaataaaaacctaaattaccatcagcacagacagagatgatccgcactcattgtaatttaggttttgcctgctttatcagtaacaatcctaccattttcatatgtgaatgtaagaaaaaatgaatacaaggaaacaaaaatgtcagcgctctcattatgcttgtttaactaccctttctatgtgaatggttaaatacagcagctcgtcacttgtgagcttgtgctcatactcccgctcaatgtaggtttggattttcttcgtgcattcatacgcgcgatgatacttttctttcactgtatccagcaaaaaatcgtcctggctttccatgtgagtgccgttaaaaagacgctgcgcgaaaaactttaagtgggtgacgaaccgataatagtgaagcgattcttcgttgaattcaatcttaaaatggtattttacaatactcaaaatctcttgcatgacttttgtaatgttgataatattgggcatctcttcattcagctcggcatttacaatatgcagagcaataaagcccgcttcatcctctggaagagacacacctgtcttgtttttcaccatgaccaacgcttctttgccgatcgtaaattcgtctttatacagccgttttgtttcccacagcaaggcgtttttgatatcaagccctttctggttgcgctggatggcaaagttaatatggtcggtcagcgacacatagatgctgtcgttgagctttttgccgagctgtaattttgcgtagctgataatctcttcggatacttccatacactcgatcggtatatcatacaaaagggttttgaacttttctgatacatccttgttatcgagcgtgaacactttctcaatgcgggcttcatcgacatcatcgccggactttttctgaaacgcgagccccctgcccatgacgaccaattctttcccttgttcattgaccacgctgatcacattattgttgatcaccttcgcaattttcatgacatgtccctccaatcaactaagaacagactatatcttgattgtacattctttttgtactaggtcaatatcatcagggaaagacggaagctggtcagtacaattcactccgtacctgctgcccgggctgtttttgaagcagcgcctccagatggcgttcaaatgatgccttgtcagctttctgctttttgacaatgctgttcatgattttgacgctttcggcgctgtattgtgtatattgttttttcagctgatccagctgctgtcttgtcttcttcgcgtttttcggtgtgacttggccgatgagtttgatcatactgtctgcggtctcaaaaaaaacggctctattttctgtcagctgctgaatttcgatccggctcatgtcttgattacgcgttttttgtagcaaggcgaccgcctcgctgttttgttttttgagcgatttgttctcaagcttaatcgattcgagattctccttcgcaatgtctgcttcttcttcagtcatgttgcttcgcacgaagtattctggattaccgattccataatcaaatgcttcgctcacttgtatcatggaactgaacacaatggccagctgcctgtcgcttgcgagggcttggaaatcctgctttttcttactgctcatcggtttggctgcggtttgttttactgtcttttgatcacagtctgcgaacatctgagcctcaccttcactttcgcatgcgctcatcacaagaactgtgaccagcaggcttatacacaagcctattcgcctcatgctctgtctcctctctgctgaatcccttctggaaaataccataaaatatagttaaatggtaccagattcacctaaccccagcaataaatcaaaagtatgatttgaagcgcaaaaacataaatattttgtaaaaattgacgtgcattccattcttttcaggcccatttttcgtacaatagaagtatcgttaccggagagggggctctgatgatgaaacgttttacgaaacaagaaaacagctgggtattatatgactgggcaaattctgcttactcaattgtcgtgaccaccgcggtatttccgttattttataaatcagcagctgcggaaagcggtgtcagcgccgctcaatcgactgcctatctgggctataccattgcgatttcaacgtttattcttgcgatgctcggccctattttaggcacaatcgccgactatgaagggtgcaagaaaaagttcttcggtttctttgtgtcagtcggtgtcgccagcaccgcgatgctcgcctttatccctagtgaacattggctgctattgttgctgttttatacgatatcggctatcggtttttccggcgccaatgtgttttatgatgcctttctcgttgacgtcacgcctgagaagcggatgaatctcgtctcagcacggggttttggcttaggatacattggaagcacgattccatttatcatcagtattgctgtcatcctgctcgcacaagcagagacgattccagtgtctgtatcggccgcaagccagctgtccttcttcataacggctgcctggtgggggctgttcaccatcccaatgattaaacatgtccatcaacgctattacatcaaaaaagaacctcatattgtcatcaacagctttaagcggctcggccaaacgatgaaacggatcaggcaataccgggcacttttcctcttcttgctcgcttatttcttttatatcgacggagtcggcacgattattacgatgtcgacatcctatggatcagatttagggatcggctcctcaagccttctgatcatcctatttgtcacccaggtagtcgccgcgccgttttcgattgtatacggaaaactggcagaacgcttcacggggaagaccatgctgtacgtcgggatcgtcatttatatgatcgtctgcgtgtatgcctattttatggagacaacgcttgatttctggatactggctatgcttgtcgccacctcgcaaggcggtattcaagccctaagccgttcctatttcgccaagcttgtgccaaagcgccacgccaatgaattcttcggtttttacaacatttttggaaaattcgcctcaattatggggccgctgctcattgccgtgaccgcccagctgaccgggaaatcctcaactgcggtgttcagtctgatcattttgtttgtaattggtattgtgattctggcctttgttccggaggagaccagcgccgatgtcagccagcagcaaaatgacctgcccctttaactgggagcaggtcattcatcatttattcgctttattcaccttcagctttttccctttgacggttgtgttcttcatcactttgagaacatgagggcctttaccatttaagatctcaacgtatgaggcgttatccatgatcgtgatgatgccgatgtcgtcagctgacacaccgtcaattttggcaatcgttcctacaaaatcaacggctctgattttctttttctttccgccgttaaaatacagcttcataatgtctttattcagctcttcgcttttgtcctttttgctttccggacggtcattcagtttagctagaaattctggtttcttccttgccacttcctcttgagaaggtgcttctattttttgaatttcaaatccgatatattcttcaatgtcggctaaaaaccgtttttcgaaggccgtgacaaacgaaatggcctttcctttgttccctgcgcgtcccgttcggcccgtgcggtggacatagctttccttttcaaccggcagatcatagttgataacaagggagatattttcaatatcaatcccgcgcgcggcgacatccgtcgccactaagtaacggtactcgccacgtttaaattcattcatgacgtcgaatcggtcttcctgaatcattccgccgtgaattttatcgcatggatatcctaagtcatccaattcatcggtcagctgattgacgtgctccttcgttcggcagaaaatgatgcagctgtcgggattctccgtcatcagcacatctttcagcaatgaaaatttatgctcttctcttacttgaatcaccgcatgttcaatatttcttgtggtaagcccggccgctttgatttcgatatgctcggggttttgcatatattgacggctcagcttctcgatatcctgcggaagcgtcgccgaaaacagcatcgtcgtacgctcagtcggcagatgcttgataatcgcctccacctgctcaatgaagcccatattcagcatctcatccgcttcatcaatgaccaaataagagagacgatccaacggcagcgtgcctttttcgatatgatccagaacacgtcccggcgtgccgacaacaatgtggcttttttgcttaagctcagctttttgtttatcaaaggaggattttccaaatacggctgtcgctttgatccgtttaaatcgtccgatgttcgtgatatcttcctttacttgcaccgcaagctcacgggtcggtgttaaaataagcgcctgcggcttgttttcatcccaattcgccagctcacagagaggaatcccgaacgaagccgttttcccgcttcctgtctgtgatttgacgacaagatcctttcgttcaagggcagcggggatcacactctgctgcaccttggtcggttctgtatatcccagtccttccaatgctcgtaaaatgtcatgactgatttgatagtttttaaaatgactcatgtataaactcctgtctcttgcagatgttctcattatactctaattgaccaaggcatatgtgttttgtcgaaaaatgatgtattaaaagccagcgattccctggcgttttagctcctgaacagccaatcgcgccagtgcgtcggcccccgcgcgattcgggtgcagcgtatctccatccatataaagcccgagtgttctttccggaccgatcgatgtaaagtatgccgagctgaggacatttaagtcaatgagatatgttttttcctcttcggccaaagctaaaatagaggccctgtaccatctgtttacagacgaatggatgccttcagaagtaaaatcggttgcccggccctgaggcgttgataggatgacgtccgctcctttcgcttttacctgacgaatcatatcacgcatcatctctttaaactccgcttcagattcattatgcttcggatttgtgtcattaatgccaagctgcaatataaaataatctcccggtttaatatacttcaggatcgcctcaagctgtccatcatttctgaaccctctcgcgatctgcccgccggacgccatgtttctcacttgaaaggtgtgtttatcgatatagtgaggcagcatctgcccccagcccgcctgcttgctgctgttgagcggataataattgcacaccgtcgagtcgccgccgacataaatggttcggttcgtcaccggctgatcagacaatttctttattttcaaggcgctaagcgtaaaagcggtgccggctttcccctctgtcaccagtagattcagctgcccgtcggtgacaggaatttggaacgtatcctccgcgccatcccctgtcatattgatgacctgaaacacgccctccgccgccacactggcccttgccgtattgccaagcgtcgccttcacctcataaaggccgttcgggagatccacttgaaacgtgttattacttttcgtcccatacgctaaaaactgaaccgcatcactcttcactccagtcccagatgctgccacatccttcatattctctggtgtttgaaagccgtagccctttgaccggtcataccgattagacgccctgacaccaatataaccaggctcaaccgaaccgtttccaaagtcaaactgatacaccttctgctccgctgccttcacactctcattcccgtcaaaacccaacatcaacatcatcacaaaaaccgttgccatccattttttcatcaagactccccctctatgaaaacgcatacattaatgcatactcggtgattgtttctttatgatgactgaatgaagaaaaaaatggcgttgaggaataaaaatgaggggagagtctcaagaaggggaaaatcagtgtgacttcttgtcacacttgatcacatcccaacctccgcaatagaaactcatctgatcttcttgatcatacacataataacggagtctttcccattgatcgtcagtcggttcaatctccaactcaaccgcatcaatggattcaaggtcatccagccttgatgcactaatgtcttcaaaccgcaaatgaatgtcacaggtttgagctgatcgttttcattcaaacacaggaatatgaatataacgatcatcttctttcatatagaaagaaaactcgtttaatgtaaatggacctgtatcctcatcagaaagatgctttttcaatttctcgtattgtgtgatattcaaatgaattcctcctatttttagttacctccaaccatatagatctccgcagcatcgtattcaaaccatatgatccgttcgcctgagtccgttaggcattggagcttcccttctgaaaaatagcttttatccggttggggatcagtgatcagaaaaacatcatcattgatggaagctaacagaaagagaaaatctgcaatatcccggtctgcttcctgtaatatggattggaaatggaattcccttttgtccagcttcgtcaccttgtaagcatgaccttcaaaatactcggacaggtcttctataaatgaaccagtcgttattacctgtatcatgattcgatcgtaggcaagccctgcccaaaaacgataaaacgactctgcatctttaagttcgcatgacataacggtttggtcaggcttaagctcgatcatgtccaaattgccaatactgcttatagaggttatttccataaaatcttccccttatcagttggatagcgcaacgcaaatctcttgtctgacttgttcatacaagagaatatgatgatacagatccttatcgttttcgatcatatccggaagtatgtcaggatacagctcaaaaaagcttttctccaacgaacgccgctgttgccggggcatccttttattcgccagcacataatccaaactgccatcaacaagcataaaaaactcatagatttccgcttcaaagccgtacaattcactaggatacggcgtttcttcaagctctcgctgtctttttttcagtttttcaaacacgccgactctctcctccgacacatgttaaataacaaactaatctatcttgaaacaggataggcggatatttatctatcgcctccaacaggtcttcaccaaacacagtgattgtcaatttccacgggtctcccaaaagtccccaagagaagtcctgatgaaaaaagaaataatagtctccatttggaaatacgggaacaggccattcgccaaattcatcctgaggcattgcctgatgagggctaaacatatatccgtcatgctgccaatctagtgcgtacattacttcgttctttccagtacctaattgaaatgcttttaaaatagaagcctctaaatcactcagcactccactcacatcattatgaccagctttactgctcatcgcgcttgagatatcaaacactcgatatggctcaggcggaatgatgtgatgccatctgcttccgggtttccattttatgagcttgttcacttctgaccagatgcggtcttgttttgtctgacttaaagcgcgccaattcatcatgatctcatccctacacctattggatatcctgtttgtaaacaccagaagaggccactgcataaacagcgttacttgtcagtttcagctgttgaacgtctagggcttcaccgttcgagtcacagcatgttatctcttccatctcttgactcacatcggcagaaatcaaataaagagacgactcaagctcttcactgtaacaattgaacgtcccaaccaaaaaaccttcttcagatatcgcaagctgataaaatgcttctgagttcggctctttatccgacagaatccatacccgtctcacgaccgtgtcgtcaaacgcggcaatgactgcatctccgtaatacagcatataaatcaagccgtttttttctgcaagtccataacaatcatctacagccggcgcatccatttcttcgagctttctatcaaagtgtatttccttctgctgaccatccaaagtaaaacaccaaacactatgcccatcaggattttcatcatcataaatgccttcatcatttaaaccgacccaaaggttttgtttctcatccaaaagacagcaggaaacccctgaaggcaagtgaaaagcacttttcactcttccctcttctgaaaaaacctttaccttcggctcatacgattcgtaataaacgaagacatagccatctgcacattgttgaaagagcagaatatcactgtatgaaatctgctctttggctttaaaaacccgaatatcaccggaaggatcatagattgaaatggtcacatcatctttcacaccttttccaatgtagacacgccccagtggatcagcatggaaaaaacaatcttgggtgtccgtgttgatgactttattcatttttaattttttcatttgttatgctcctaggttagaaatgaagtgataattaagcatttattagctattagtaacggacagcctagtttcattaatcgttttgatataaagctactttccaattcagtcttaaagcatttagtatttaattggtatgcataaaacgattgatcatcaaagcgaactgtttcagcttcaatagcaatcagcattctgttcatgtcaataagaaagttagcatttgattgatactccggaattatataatttgatagattctcgattccttctggatgataactcatctcaaatacttgccaactgtattcttccggatctattttttccaatctcatgtcgccaacatctgcactataataagcggatgccacattttgaaatgatattttatgcgtatattcaccttcatcttcaaaaaccttaatatcaagtgagagttcttttttaaacacattaaaatctaaatgaagaacactgcacccctcatctatataatcaacccattcattaatcgtttgatacattgtcatcccctgcttctttttaatcaatagcgcctttccaccaagcagaaagcaaattactccgtatattgtttgatccaatcatttaaatcatctgttgaatgcaaataagtttcaggagaatctttcaaatcaattccgcttaaaaggattaacatatcccagactctaccgttttttactttagggtcatccgcataaatataagggcccgcccaatctgacacttcttctcttgttgtttgtccatttaagacacttttgattttatttatgcattctagtagttttggctcgatcaaattgatcaccacgcactcaatattcgtttggtataccgacaattctatttattttattaaagcctgctgagcaatcagatgatcaacagacaattcggtaaaagatcctctaccgaatgaattctattattcgctttgaagatccaaacaaagtatttaataaatgttattctcattaacaataattgcatttttatattcttctgctgatgttttcataaaagaaatttttttatgattaaataaagtattagtttttaaatttgcagagtatatataatcattactatcgctttttaataccaactaagttttcaatatattatatgctctattgttttatttttttcaagccaatcatagtcattaagagttgatatttcatcaaaatagtacattcacttttccttttactaattgagaaagctttttttcgcaccaagaatttgaaataactgtattattgatttaacatgttagcttcattggaataggattacaatatttttctggaacgtttatgttattttaagaatcaaaaaaaggccgcataggcctttttacattttccattattgcatttgttcaatatccgtaccctcagctgtcacattcgccttcccctgcctcctgacaagcgtcaaggccatgcccgcaaagatcattacgatgccaagcgtttgatagaggtcagggcggaaacctgtgaagacggtatcgagcacgattgcgacagcggggtcgagaaatacaatgattgaaataaatttcgttgataaaaatcgtaaactgtcaaaaaacaacaaatatacaatacccgtatggatgatgccggtagataccaccataatccagtttccctgagataggtcagcaaaagcgccaaagtgaataaacggaatcaggatgataacccctaaacccgtctgcaagaaggtggtcgtgtaaggactgagattgtgaatgccttttcccaataaagtggtgaacgcataaaacagtgcggcgagaactgcccatatgatccctgatcccatcagctgtgtcaatgaagtgctgccgttaatcccggaaatcagcgcagttcccagaaagcagatgataatggagctgacggagatcacatttaatttctctctgtagaggaagctacccagaagaagaacaagcaccggcgctagatgataaacggagatggcaattgtaacggacgtttcttcaaaagacttaaataagaacacccagttgaatacaagaaagaaaccgcacaccaatgtttgcagcacgtctctcttgctccatttttcagttttatactggccggacgccagccagcaaaggcctaaaaacagcgtcgcgcaaaggcagcggacaaagaccaattcaaatgacggcagattagtatgctctgagaaaaagccgatggagccgaaaatcaccatagagatgaccattttgattacggctgttgttgatttttgttttggtgtgattgagagatcttgctgcatcaagcgtattctacctccaattatgtatagggaaaagcaccccaactgcaaggtgcttttccttttttatagtttcttgccggccgtccagccgccgtctatgacaaagtttgaacctgtaataaagtgcgcctcatcagaagccaaatacttcatacaggaaacgatatcactcggctgcccccacgtatgaagggcatggttatctttgatcagctgaaccatttcatcgtcttgaaaatactcttccgttaattctgtttggatcacgcccggcgaaatgctattcaccctgatcccctttgatccgaactccatagcgagctgcttcgtcagtccgatgatcgcatgcttggaagacacataggcagcccgcgcaggctctgccatcagcccggacacagaggcgatgttgattatacaccctcgtttccccagctttgaccacagccttgccgcgtcccgagaaagaataaaggctgccgtgagattaatgtctatgacctttttgaatgattctgctgataattcaagaacaggggtaatttcccttatccctgctgcattgatcaaaatatccgggatcagccggcttttttcaagttttagcatcaaagattccgcctgccggacatcagacaagtctgctttttccatgtgaaactcactgtttactataaattctgacattttattcgtttgaatatccactccaacgactcgaaagccttctgttagaaattgctttaccgccgcaaagccgattccgctatttgccccagttatcattatattctttttcttcatcattttacattctgccttttttcactttggtaatttgtaataatctgaatattattatttgacaatatattacaaataatttagcattgcactacatcctctattttccacattttctatcatacaggaaattactaaaaaaaacatctactttttaaggagagattcatatggttcaagtttcaaacgtacaaaaagagttgacatccgatatttctaaatatgcttcttttttaaaggaaaacggctattcgtatatcccagcagatttctatcagcagaaaacaacagacgctgcagtccgcgaattacagcttacatatgatgatttgaaagctgattctaaaggaggcggccgttacagagcgcattcccgctacattttggctcctcactccgacactcttgaattagatccggataatggatatttccaatcaaaagaatataattatgatgatggcggtatcgtcagacaattcgaaaaaatatcagatgagtttctacagcatcctgtaacgcggcacatgatacattcaaatgtagaaatggctcgccaaaccgattttgtagattgggagaaagaagtgatcgtcgggcttcaccaagtcagatatcaagtgacacctgacgcgccttcatacagctcacccatttggctgcatcgtgacgatgaaccgcttgttttcgtccatctatttcagctgagcgaagatgctatcggaggagataacttaattgctccgtctgttaagcaaattgataaagtgctgcggctgacagacccgcttgagacacttgctctcgggcaaaaggtctttcatgcggttacaccggtcggcactgccaatagagatggtgcgcatcgagatatattattagttacattttctaacagataaaaaaagcgcccttgggcgctttttttacaaatctatcgaacaattaaaaccgggcatgttgataattgagacactttatggctgacgcttccaagcatcatttctttcaggccgctgatcccccggctgccaactacaatcaggctgacgcctttctcttttgcgtgatttagtatctcatgcgccggctcgccattcgcgtaaatggtttcagcttgaacgcctttttcggctgctttttcttttgcattctcaaggattttcaggccctcttttttaacctcgttcctgatttcatcaataaagtgttcaggcacatagacaattcccgtcagagaagaagtcgtgacgacggcttctctccccacatgaagaatgcttagttccgcttgttgctcttttgccaaatgcactgcggcatcaagcgcttttgcactcatgtctgatccgtcaatcgctactaacattttgttaaacatgctcttcccgcctttcggactgtgggtggttcatctttctcttttattgtccgcctgcatttcgttattgtcaattgaagcgcatgagttttcaaaaaattgtcagagactctctccgtttgtggcgatgacctgctgataccagttgaagctttttttcttgatgcggttaaatgttccatttccttcattgtccctgtccacataaatgaaaccgtagcgttttttcatttccgcagtagatgcgctgacaaggtcaattggcccccatgatgtgtatccgattaattcaacgccgtccgcaatggcttcgcgcgcttcaattaaatgatcacgcagatagttgattctgtaatcgtcctgaatcgtgccgtcctcttcaaccttgtctacagcgccaaggccgttttcaacaatgaacagcggcttctgataacggtcgtataaggtgttgagcgtgatgcgcaagcctttcggatcaatttgccagccccattctgatgatttgaggtaagggtttttgactccgcccagcaggttgccccctgattttgcaagctcttccggatctgtgctcgccgccatcgacatgtagtagctgaatccaatataatccaccgtatgttctttcaagagctcttcatcgccttcaaccatttcaatttcaatattgttttctgccagatagcgtttcatatatcccgggtatacgcctcttgcctgaacatctgagaagaaaagtgttttgcgctcattctccattgccgcgaagacatcctccggcttagaagtcatcggataggttgtcgttgccgctatcatacagccgattttcgaatcaggaatgatgtcgtgacccgctttgacagcaagagcactggccacaaattggtggtgtgccgcctggtacatcgcgtttaatttgttttctccttcttcaaaaacaagaccgcctccggtaaatggcgcatggagcactacgttaatttcattaaacgtcatccaatacttcactttgtgttgatagcgtttgaaaaccgttttggcatagcgttcataaaactctatgactttgcgattcttccagccgccataatttttcactaaaccgagcggcatctcataatgagagatggttacgacaggctcaatatgatgctttaacagctcatcaaacagatcatcataaaatctgaggccttcttcattgggctcctcttcatcgccattcggaaaaattctcgtccacgcaatcgatgtgcggaacgccttaaatcccatttctgcaaataaggcgatatcctctttataacgatgataaaagtcaatcccgttgtgatacagattcaaggaagtcattgattcatcaaatggagacatgatcccgttcggcgatacgtcagctgtcgaaagccccttaccaccctcgttataagcaccctccacttggttggcagcaactgcgccgccccataaaaatccttctggaaatcgtttttcatttgaactcatattgatcaccccattagttttttcaagataaagcaagcagcgcttcttttggctgcactttaccgatctctttcaccggcgaaaacgaatattggtctgtgttggtcacaatcaccggggtaatgacgtcatatcccgcggctttgatttgctccagatcaaaggacacgagcggatctcccggtgcgaccttgtcgccttctttgacgtgagccgtgaaccattgtccctccagcttcaccgtgtccaatccaatgtgtatgagtatttcagctccctgatcactcgtaatgccaattgcgtgttttgttttaaaaatggtggtaacgcttccacgaacaggcgacacaacttctccttcttcaggctcaatggcaaatccttttcccatgatcccggcagaaaatactccatctttgacttcacttaaggctttcacttctcccttaatcgggctgtgaatgatctctctgctgccctcatgcactgccggctgctggctgccgtcagaaggcacatcctcgaatccaagcaaatacgcagctgctgttcccgccgcaaacgcaatcacaaggccgatcatcgcgtaaataaacgttgggccgataaagacagggatgctcgggagacctgcattccctccgacgatataggaagcaacacccgtcatgccgtaaaacgcgccaccggctgcaccgccaatcaaagcggccgcaaacggctttttcaatcgcatattcacgccgtacatcgcaggttctgtgatccccatcagcgccgtgatgcttgtggtaagcgcgagtgatttaaattttttgtttctggagcgaaggaagacggcaaatgatgctcccgcctgccccatattcgccaaaaacatagccggcagtaaataatcgtggccgttttgagcgatgttgttgatcatgatcggcacaaaggcatagtgcatgcccgtcataatgattaaagagaatgtacccgccagcaaaatcattgccacaagccctgcatgatcaaacaaataattgaccccagaagacaagtattctcctaaaatagcgccaagcggaccgactgtaatcaatgtcagcggcacgacaatcaatagcgtgaatgtcggaaccacaatcaatttgagagatgcgtgtgtaaaacggtcaatccatttttccacgtatgaagcaatccaaatcgacagcaaaatcgggatgaccgttgacgaataagtggcagcggttacaggaagcccgataaaggaaatcggtttccccgcaccgagcagggctgtcaaatccggatgcaggatcgccgccgcaatggcagccgctacgtacggattgcttccgaattttctcgccgcactcatcgctagcaggagcggcaggaagtagaacgcaccgtcaccgacagccgtcaaaatgacatgaacctggctcttctccgccatccagccaaacgtaactgccagcgcaacaagccctttgatcatccccgctcccgcaatcgcaggcagaatcggggtaaacacaccagaaatcacatcaaagaccgcactcagcacattctttttctgagaggatgaaccagcgctcttttcatcactgagattgctgtgccgcacaatcgcctgatacaccttcggcacatcgtttccgataatgatttgaaactgctcgccgctgatattggtgcccatcactccaggcagctgctccaactgactgcgatccgccttcgaattgtcatgaagattaaaacgcagcctcgtcatgcagtggatcacgcgctgaacgttgtcttcaccgcctacgagttgtaatatgtccttcgataatttatcataatccatgtgtatacctcctttttatggggggactgctggaagaaaggtggccgcctttcaccagctttttttctatcaaatgctgcatcacctcctaaaagagaataaaaaaaacctaaatgacacagattgcgagagtctcctcctgcacctgcaccatttaggttttgcctgctttcacagtaacaatcctgacgggtcgttttatttgtttgtaggtatactttagcactagatttatcggatgtcaacgctttcatttttgagttttgactaaagggaattacttattgaggactgctttgttatagagggaagccattttgtatattttgttttatttttctgaaaatactatcaaatatatcagctgacttaatataaaagtaaaaaaccttgaaaggcaatttagcccatcaaggtatatgttttatttttgactatcccttttccatatactttctccgtcagttaaaaaaactgcacttggcggatcatcataaagtgaaatttcaactaatgaacctttcttttgtattaaccaattatataaactactttcttcactagtaggatgagctaaaatatcatttacttgaaatgtaactgcataatattcgataaaattcacatcatcgtcatccaacccattgtctgtttcaaagagtgtgtctggttcaccaataatctttaatccactatcccactctattatcaagtcactatctttatactcttttaacgcttttattaaaggatcatattccatgtatatcctcctcaagagaaaagtctctgcaatcatgccgtgagagtcagattctacagaggaaatcgcatgctgtgtttgtttcagtacttttttgtattcgtcgataaacatgccaaagaaaaggagaagggtttatgaattagctttataaaagattatttttattaaaaaaccttgaaaggcatatagccagtcaaggtatgataacaataacattatatttagaagtatcaactacttcacctactgatttatctgagagaatatcataattgttttatatattctttctaataaaataaggctattttaaagtaactccactccaacttgtttgcaaaatttaactttaagtctctcttcttgacccacattcattaccataactttgtcatctttttttatacttgttacattattaaaatcacctgtaaatactatagaatcattaaatgtaatacttagactactcgtttgcttatatacatctaaagttaaaatcaccttgaaattttggtcatctttgtaagtataaattaattctccatcatctatattgcctgttatactcaccggctcactttgaaaaagttctaatagatcatattcatcatactttataaacatttgtattcatccttttattaattatttcggtataactgtgataacatcgcctgcttcatttattattactttgacatccagtgtttcatgaacaaacgttccgcttctattaccaggtatctttttcgtattcattatagcgtcttcaataactgaaggtgaaatatttcttgggtcaacatattttttgataaaatcactaaattcttttgtttgtggtttatatcctaattcttcagcttttttaattgctctacttgttaaagtagcttttacttcaggaatatcaggtgccattctttccaaagcatgctgagaatactttcttccatttatttctcctccgccttttgacatgttccaaccaatttcacccttacccttagaagcaactttattaacctcacccttactttccttctccgcaacatgtttagccacatctgtgacaacacgcttcccgcctcggaccgccaattttttaatagcgccctgaggacttacccactcaataaattcatattgagttccggcaagaaacgaatcaattggcttagctccgcctactttatcctctggtatgtaagacacttcttctagccgctttttccctccagcatagaattctcttacgatctggccgttttcataaacataatatttgccgccgacatagtcgatgcttgcagtattgcgagttagttcgtcaatcacttctatcgtatctatcttttttaatcttttattattatatagtttatcatttatcacccgtatgtctccatagactttcgggtgagctgctgcttctttctgtaatacagttacgttactgtcatcagcatgaatctcacgctcgatcttctgttgtttgccatccttcatcacgatatcaacgttggactgcttatgtttctctattttcttcagcatcatctccatcggtgaatcatccggctgcttcatttgcgagttaatgccgccgaaggtttggttgatgttttcttcttcctgtgatttcaggatagagccgcttttgtagcctgtgatttcaattttcggaccggtatacatggttccgagctggtctatatattttttcatcgtttgaaaatctgattttgcggtttctaatgcttgggtttgctggccgtcaaattgaaagagcttattcagggtgtctgaaatcagccgctcagcctgttctgtttccatccgaaaaaaggaatcattgactgtcggcaggctgacgatgtgatcgatggctgatgtttggcgattgactgcgtcagtgagctgctctgtcacttctcgtgcatgcttgaccccatgtctcgcatcgtgtgagagaaaagcctctgcgatcatgccgtgggagtcagattctacagaggaaatcgcatgctgggtttgtttcagcacttttttgtattcgtcgataaacatgccaaagaaaaggagaaaaggcttgtggcactcctcgtaaaaggtccggatggcatctccgccttttcctttcagcgcatccctcatgcctgccagatgctcaacgcttttttccagcttctccagctgttgtttttgcttgtccagtttctcaatcgtatgctgaatgccctcgtgaagagcgtggacatctaatgttttcaatcccttgtcctcccgcgctttatttcatggaagatgatatgttttcgtccgtttccttcatggcgtttaccgcgctttccgtttgtgcgatatgcttggccagaacagacgcatatgcttcagtgagctctttgatgtccttatttaattgctcgatggacttcacaacattcaaatggtttctgcctgagagatggccgggtaaggaggacttgagttcagctgaattcttgagctgagaaagcccttgcttcactgtgccatacaccattttaatttcctgtgccatttgtgctcacctcactttttatgtttttctttctctatttcatgctctatcctcgtaatttggcgtcttatggaatagacatcgccctctaatgagtggatttttccttctatgctttcgatgattccgttgacttgatcgcttttgatttgctgatatgctttgttcattccttcacgaatatcttcaaaccgctgagcatgtgttcctctccatgcctcccggttaagatgaggccggtgaatgagatgctgggcctcggagaattcgtgtttgatttgcctgatttcgtgcagcactcgttttaattgatggatctgttcctgcttttcatgtaagtcggcttttaccgaatgtaacaacatttcactatgcatgccgcaacacctcgtgtttctatcaaactgtgtcaattctttacaatacagactattttcatattacatgatgggtcatattggataaataggtaaaaaggattgtcttgaggaactttataccggttctaaatagctaaaaattcaatttcataactttgtaagagggagaatcatcatattggggacttttcgtttaggtcttgaaccccgcaatcacttctgttttttctctcgctcaaccatttcttatagtcaataaagctcataaaaaagcgccttctctagaaggcgccttctccatcttatttagatccccatacagcctcaccgttgccattcaaaacactaaacgtcatgacgttcttctctctcaccgaatcccactggcgtaaaaataccccgttatacttcttgccagctaacgtgatgtcgactgtgttttttccggttttctgccatgttccggtcatttccccggaaatggtgtggtttttgttgagctggataatgatggtttgtttgatgtcggctgagatgtcttttccgtgctggataagtttgtatgttcctgtgatgtctttttgttttacttctttcaatgtttcgcccgcataacgatatggtgctgctaccggccagccgtctttgttcatgaacaattggtggactctgacttcgtgttcttcacccctgcccgggaagcgggtgtggaagattaaataggaacgcccggttttttcatcatagtatgcggagttgtggcctggtgagacgtacccggtgcctttttcattttctgtttcaaaagtgtagctgcccatgagtttgacgccgtatggttcgatggaacggtcgtcgaagaatgtgccttctttgccgcggacgtcaagcattggattgccttctgcatcatagtaagggccgtctggtttcttggagcggaccacacggatgttatagccgcctgttgcatcaagaccgccatatgataggtataagtagtagtatttggtgtctggattgtagagaacatacgggccttcgattctgctatggttgccgccgagcagttttttcccgtatccctgtccaggaagcgggaagcccgttttcggattcatttcaagtatgaaaatgccgcctgagtatgatccgtacaccatccacagcttgccgtctttatcaaagaaggtatgcgggtcgacgacattcggatgtttggttgcgtcatacggtgttccatcgttgcttgtgccttccattcctgatttcaaaaagatgcctttgtttttgtatgggccttcgatgttgtcagcaacggcaacacccatggcggatcttggcgaatcgccgcggcaggcgttgtagtacatgtagtatttgccgtccgccagctgcgtgacgtcagccgcccaaagagtatcggattgcgcccattcgaaggtttcttttaattctttatagacattcgggataagtgggttgtcattgcttacgctggtggtcagctgctgccattgcatgaggtcattcgatttagctgaagcgagatgagatccaaaaacataaaaagtgccgtttgtttcaatgatggaagggtcatggacgctgacttctttaaatataggtttttgtgcatagacggagtttgggagggtgaaggccatgataagagctgcaagaaaacatacacagaacaatcggttgaacatctaaacaattcgcctctcttttttattaaattttaaacgcttacatttccctatgaagataccccggcctattaaaacagccgaatgttttcatattcaaacagataggtgatttctcactgttctcttacatagtcagactgatgtctgtctgttttgcgcagaactgctgcttgcatacctctattcatagttcaacccttttgccgtttctccttcttcaattacttctgtttcttcatttgcgtacataatgaacgctttgtccggtcttgtaaagtcgtcgacttttctccggcaacttcgcctctttttggcattttacctctcattgtcagcaatatgacagcggccgcttgcacttctgtctgggtatgcgtgtgcaatgtgctgctttctgcgtcacactattacaatagcaatctaacttgttaaagactgtaaaaaaccttttgacttctgctgctgaaccaattaatataatactcagttaatagttatcagaatttttaggaattgagtgattcatatgacactgcataaagagcgtcggatcggccggctgtctgttctcctgctgctgaatgaggcggaaaaaagtacgcaggttgaggagctggagcgagacggatggaaggtctgtcttggcaaggtaggatcaatggacgcgcataaagtagtagctgcaattgaaaccacttccaaaaagagcggtgtcattcaatctgagggttatcgggagtcacatgcgctttatcatgcgacgatggaggctttgcatggcgtgaccagaggtgaaatgctgctgggatcgctgcttcggacggtgggcttgaggtttgccgttttgaggggaaatccttatgaaagtgaagcggaaggcgattggattgctgtctcgctttacggaacaatcggggcgccgattaaaggtcttgagcacgaaacattcggtgttggaattaatcacatatgaaacagcccatagatcttagacaatagggggctatgcgtgaaaacagatgttcacagcatagctcctttttgtatgggcgctttaccaaagtaaagaaaaaggagttgggcttatggtgactttagacggttcttcattgacaacagccgacgtcgctcgtgtgctgtttgattttgaggaggcagcggcttccgaggaaagtatggagcgcgtgaaaaaaagcagagcggcagtggaacggattgtacgcgacgaaaagacaatctacggcatcaacaccggatttggcaaattcagcgatgtcctgattcagaaagaagactcggcggcgctgcagctgaatttaattctttctcatgcctgcggagtcggcgatccttttcccgagtgtgtgtccagggcaatgctgcttttgcgcgccaatgcgctgttaaaaggcttttccggtgtccgcgctgagctgatcgaacagttgcttgcttttttaaataaacgcgtccatcctgtcatccctcagcaaggatcacttggcgctagcggagatttggcgccgctttcccacctggcgcttgcgctgatcggacaaggagaagtcttttttgagggggaaagaatgccggcaatgacaggcttgaaaaaagcaggtattcaaccggtaacgctgacatccaaggaagggcttgccttgattaacgggactcaggccatgactgcaatgggggtggtcgcctacattgaagctgagaaactagcctatcaaacagaacgcattgccagcttaacgattgaaggtttgcggggaattatcgatgcatttgacgaggatattcactcagcacgcggctatcaggagcagatcgatgtcgcagaacgaattcgcttttatctatctaacagcggcctgacaacctcccagggagaactgagggttcaggatgcctattcattgcgctgtattccgcaagtacacggtgcgacttggcagacactaggctatgtcaaagaaaaattagagattgaaatgaacgcagctacagacaatcccctcattttcaatgacggtgacaaagtgatttccggcggaaactttcacggacagccgatcgcctttgccatggattttctgaaaatcgcaatatcagagcttgcgaatatcgcagagcgccggatcgaacgacttgtgaatccgcagctgaatgacctgccgccgttcctgagccctcatcccggtctgcaatccggtgcaatgatcatgcagtatgccgcggcctcactcgtttctgaaaataaaacactggcccatccggcaagtgtggattccattccgtcatccgccaaccaagaggaccatgtcagcatgggaaccatcgccgctcggcatgcttatcatgtgatcgcaaatacaaggagagtcattgcgatcgaagcgatttgcgcattgcaggctgttgaatacagaggcatagaacatgcagcgtcctatacgaaacagctttttcaagaaatgagaaaagtcgtgccgtccattcagcaggatcgtgttttttcctatgacattgaacgcttgactgactggctgaagaaagaatctttaatacctgaccatcagaataaagaactaagggggatgaacatatgactgatgtaaaaaaatcaatccgtgccaacagaggaacagagcttgaatgcttaggatgggagcaagaggcagtgcttcggatgcttcgaaacaaccttgatccagaagtcgccgagaagccggaggacctcatcgtatatggcgggattggcaaagccgcacgggattgggacgcttttcacgccattgagcattccttgaaaacattaaaaaatgatgaaacattgctcgtgcaatccggaaagcccgttggcatgttccgtacacacccgcaggccccgcgcgtgctcctagcaaattctgttcttgttccgaagtgggcagactgggagcatttccacgaacttgagaaaaaagggttaatgatgtacggacagatgacggctggaagctggatttacattggctcacaaggcatattgcaaggaacctatgaaaccttcgctgagttggcgcgacagcacttcggaggcagcttaaaaggaacgttgacgctgacagcgggtctcggcggaatgggaggcgcacagccgctgtctgtcacgatgaatgaaggcgtcgtcattgctgtcgaggttgacgagaaacgcatcgacaagcggatcgaaacaaaatactgcgatcgaaaaacagcatcgattgaggaagccttagcttgggctgaagaggcaaagctggcaggaaaacctttgtccattgcacttctcggaaacgcagctgagatgcatcacacaattttgaaccgaggcgtcaaaattgatattgtgacagatcagacatctgcccatgaccctttaatcggttatgttcccgagggctattcccttgatgaagctgaccgtttgcgtcaagacaatccagagctttacgtgcgccttgcgaagcaaagcatgaaaaaacatgtcgaagccatgctggcctttcagcaaaagggctctattgtatttgactacggcaacaatatccggcaagtcgcaaaggatgaagggctggagaatgccttcgattttccggggtttgtccctgcctacatccgccctttattctgtgaaggaaaagggccgttccgttgggcggcgctttccggagatccggcagatatttaccgtacggatgcgttattaaaagagctgttcccgacaaataaagcccttcaccgctggattgatatggcacaggaaaaagtcaccttccaaggcttgccgtcccgtatttgctggcttggatatggagaacgaaaaaagatgggcctcgccattaacgagctggttagaagcggggagctaaaagcgcctgtcgttattgggagagatcatttggactgcgggtctgtcgcctctccaaaccgggagacagaagcgatgaaggacggaagtgacgctgttggtgactgggctgtgctaaatgcgcttgtcaacacggcggcgggtgcaagctgggtttctttccaccatggcggcggcgtcggaatgggctattccctgcatgccggcatggttgcagtggccgatggaagtgagctggctgacgagcggctcgcgcgggtcttaacgagcgacccaggaatgggcattatccgtcatgcggatgcgggttatgaacgtgccgttgaagtagcgaaggaacaggacattatcgtgccgatgcaaaaataaaggagtgatgacatgccaaagcaaattgatacgattctcatcaacatcggtcagcttttgacgatggaaagcagcggtccgcgggcaggcaaaagcatgcaggatcttcatgtgatcgaagacgctgttgtcggcatccatgaacagaaaattgtgttcgccggacaaaaaggggctgaagccggttacgaggcagacgaaatcattgactgttcgggacgccttgtaacgcccggcctcgttgatccgcacacccatcttgtatttggcggatctcgtgaaaaggagatgaaccttaagcttcagggcatttcatatttggatattctggcgcagggcggcgggattctgtctacagtcaaggataccagggcggcttcagaagaagagctgctgcaaaaagcccattttcatctgcaaagaatgctgtcctacggctcaaccacagcagaagtgaaaagcggctacggcttggaaaaagagacagagctcaaacagttgcgtgtcgcaaagaaactgcatgaaagccagcctgttgaccttgtttccacatttatgggagcccatgcgattcctcccgaatatcaaaacgatccagatgaatttctggatcaaatgctttcccttttgccggaaatcaaagagcaggagctcaccagctttgctgatatttttacagaaacaggcgtttttacagtcagccaatcccgccgttatttacaaaaagcagctgaggcaggcttcggattaaaaatacacgcagatgaaatcgatccgcttggaggcgctgaattagcaggtgagctaaaggccgtctcagccgaccatttggtaggtgcatcggacgaaggcataaagaaattggctgaggcaggaacgatcgccgtcctcttgccgggcacgacattttatcttggcaaaagcacatacgctagggctagagctatgattgatgaaggtgtatgtgtcagcttggcaacggattttaatcctggcagctcgccgactgaaaatatccagctgattatgtccattgccgcgcttcatctgaaaatgactgcagaagaaatttggcatgcggtcacagtcaatgccgcatacgccatagggaaaggagaggaagccggtcagctcaaagtcggccgctcagctgatctagtcatttggcaagcctcgaactatatgtatattccgtatcactacggggtcaatcatgtacatcaagtcatgaaaaacggaacaattgttgtcaacagggagggagccattcttggataagtacccttttctcagagaggccggatcttcgtttaaagaccgggatgtcacaaaaatgagcgacctgatcgcaacatgggacggccaggacattaagggaccggcgttgataggtgtccccctatcaaaatcctccatcagtcattcaggcgcttcctttgcacccggaacaatacgccaggctctgaaacattcatcagcctattctgctgagcttggagagcatgtcgtatcagagcttctatatgatctgggggatatcgatattcatgtcactgatatcgtaaagtcacatcatcacattttccaaaccatgcacgctctgctttcggaccatcccgattgggtgccgctcatacttgggggagataactctatcagctactccacaataaaagcgatagcacaaacaaaaggaacgacagcagtgattcaatttgatgcccatcacgatgttcgcaatacggaggacggggggccgacaaacggcacccccttccgccgccttttggatgaagagattattaaaggccaacatttgatccagctcggtatcagagaattcagcaacagccaggcctatgaagcatatgcaaaaaaacatagcgtgaacattcacacgatggacatgatccgggaaaaaggactgatcccaacgataaaagagattttgcctgccgttcaagatagaacagatttcatttttatatctgttgacatggatgtcttagaccagtcccatgcacccggctgtccagcgattggcccgggcggcctctatacagaagaattgcttgaagcagtcaagtatatcgcacaacagcccaatgttgccgggattgaaattgttgaagtcgatcctaccctcgattttcgagatatgacaagcagagctgcagctcatgttctgttacacgcattaaaaggaatgaaactctccccattcaagtgatcttctggcaggttgtattttgggtataagaaactcatctgcctaatgaatggcagctaaaaggagggcgagacagtgaatcttcaggagaacagcagccaacagctaaaacgcacaatgaaaagcaggcacctatttatgatctcattgggaggcgtcataggcacaggacttttcctcagtacgggctatacgctacatcaagccggacccggcggtacgatactcgcttatgtaatcggcgggttgatgatgtacctcgtcatgcaatgtctcggcgaattgtcggttgccatgccggtgaccggctcttttcaaaaatatgctacaacatttattggtccatctaccggttttatggtcggcatcatgtactggatcaattgggtggtgacggtaggctctgagtttaccgcatccggtattctcatgcagcgctggttccctgacagcagtgtatggatgtggagtgcgatttttgcagcccttctttttatatgcaacgcattttcagttaagttatttgcggaaactgaattttggttttccagcgtaaagattgtcaccattattttatttatcattctaggaggagccgccatgtttggcctgatctctttaaacggaacggcggatgctcctatgttgtcaaacttcacggaccatggcgggctgtttccgaatggctttcttgccgtttttatcgcgatgatatctgtgagttttgccttttctggtacagagttaatcggcgttacagcaggagaatcagcaaatcctcaaaaggatattccgcgatccatccgtaatgtcgcatggagaaccgtgatttttttcattggcgctgtcttcatattatccggattgatttcgtggaaggacgcaggcgtgattgaaagcccttttgtagccgtatttgcggagatcggaatcccttacgctgctgatattatgaatttcgtgatattaacagccttgctgtctgtcgccaactcaggcttatatgcttcgacccgtatgatgtggtcgttagcaaatgaaaacatgatcagctcccgttttaagaaagtgacctctaaaggcattcctttaaatgccttaatgatcagtatggctgtatcttgtttatctctcgtttccagtatcgtggcccctggaactgtctatgtggtgatggtcgcaattgctggatttgcaggagtcgtggtctggatgagcattgccttgtcccaactcttgtttcgaaagagatttctgaaaaaaggggggaatgtaaaagatctgacatttcgcacgccgctttaccctcttatgcctatagccgctcttttattatgctcagcttcttgtattggtcttgcttttgatcccaatcaaagaatcgcacttttctgtggagttccttgtatcatcctttgctatctgatctaccatttcaaaagaaatgtttcaaaagcgaaaaaaatcagccaagaggaatatccggccgatcacatcctgtaattaaaaaagcacaccccgctcaggatgggatgtgctttattttttattcagtaatcaacgtatgaatcagcttcggcgccttcgcttccgcggcgaggcggatgttgtcatagacttttgcgatgacttcatcgacgttttcgcggttggcgtaaagcgtcacgagcggttcgcctttttctactttgtcgccgacctttttgtggagcatgatgccgacggctaaatcgatctcatcttcttttgtggcgcgaccggcacctaacagcatcgccgcgacgccgatttcgtccgcaacgatttcagagacgacacccgcttctttggcaggcacatcaatttgatatgcggcttgcggaagcttagacggatcgtcaacaattgagctgtcgccgccttggtttttcaggaaatccttgaatttctcaagtgctttgccgtttttcatgacttcttccagcttcgctctcgcttcgtccaatgtatcggcttttttcgcaagcacaaccatctggctgccgagcgttaagacaagctcatgaagatcctcgggtccctcgcctttgagcgtgtcgatcgcttctttgacttcaagcgcatttccgatcgcaaagccgagcggctgggacatgtctgaaatgacagccattgtttgacggccgacgttatttccgatgcgtaccatcgctttggcaagttcagctgcgtcttcttctgttttcatgaaggcgcccgctcccgtttttacgtcaagcacgatggcgtccgccccggcagcgatttttttgctcataatcgagcttgcaatgagcggaatggaattgaccgttcccgttacatcacgaagcgcgtacagttttttatcagccggcgttaaattgccgctttggccgatgaccgcaaccttgtcgcggttcacaagtttaataaattcatccttcgtcagttccacgtggaagccgtcgattgcctctaacttatcaatcgtgccgcccgtatggccgaggccgcggccggacattttggcaaccggtacgtcaagagccgcaacaagcggagcgagaacgagtgttgtcgtgtcgccgacgccgccggtggagtgtttatccactttaattccttcaatggcagaaagatcaatcgtttcaccggagttcaccatagccatcgtcaagtccgcgcgttcacggtcactcatatcctggaagaaaatcgccatagcaagcgcgcttgcctgataatcaggaatgcttccgtctgtatagccgttcacgaaaaattgaatttcttcagtggtgagttcttttccgttttgttttttgatgatgatatctaccattctcatgtttggtcaccgatccttttcgattaagttcagtaaatcaagcccacaattgctgctgataaaaagctgacaagcgtagcaccgtataataatttcaagccgaaacgagcgacgacatttccttgcttttcattcagtccttttacggcaccggcaatgattccgattgaggagaagttcgcaaatgacacaaggaataccgatacgatcgctgttgtacggccgctgaaatggaaaccgttttgcgtaagcgacgtcatggcgacaaattcattcgataccatttttgttgccataatgcttccagcattaacagcttcattccatgggataccgacaagaaaagcgaatggagcaaacacatatccaagaatgccttggaacgaaataccgaatactgcattaaaaatgccattgatcaaggcaataatcgcgacaaatccaatcagcatcgcagcgacgacaaccgctactttgaaaccgtcaaggatgtattctccgagcacttcgaagaaggattgtttttcttcttcctcaacacgaagcatatcctcttcttttgcaacctcgtacggattaataatagaagcaattatgaaaccgccaaataagttcaagaccagcgctgttacaacatattccggtttcagcatggtcatatacgcgccgacaatcgacattgacacagttgacatcgcagatgcgcaaagcgtgtacaagcgctgctgatttaaaagaccgagttctttcttcaaggagataaatacttctgactgccctaaaatcgcagaagccactgcgttatacgattccaatcttcccataccgtttaccttgctgagggcaaggccgatatatctaatgataaacgggaggactttccacttttgcagaatcccgatcagagcggaaataaacacgattggcaagagaacattcataaagaatgtcgtttggtccgcattcaccaagccgccaaacacaaagttaattccctcagccgcgtattcaagcagataaccgaatccttttgcaaatcctcccacgagaaaattccctatcccggtattgaggagaatgtagccaagaataaattgcaaaatgagcataacaacaattgggcggatcttaattctttttttgccgctgctcgcgatccacgcgaggcctaaaaacacgattaaaccgataatcccaatcaaatacttcatatgtgtttctcctttatttgtattcgcttacaatcactgtttcctcagaaaacggaaagcagtctgccttccgtcagctcttaatagttgtctccgcctgatgcattttctccttttacgatagaaacgcctgcgctggcgccaattcggcttgctccggcctctaccattgtgtctacatcttctttcgttctgacgccgccagatgctttcacgccgatatcaggtcctactgttttgcgcattaaggcgatatcttccttcgttgcgccgcctgtagaaaagcctgttgatgtttttacgaaatccgctcccgcagacaccgctaaacggcatgcacgttctttttcttcatcagtcagaaggcacgtttcgataatgactttgacaagcgcttttccggctgcagcttccactacaccgcggatatcagcttccaccacatcgtcttccttgtcttttaaagcggcaatattaatgaccatatccacttcagtggcgccttttgaaatggcgtcttttgtttcgaatgcttttgtttcagttgtattggcaccgagcgggaagccgatgaccgtacaaacgtcgactccagttcccttaagctcttttgcagcaagctccacccatgtcggattgacacatactgaagcaaatttgtatgttttcgcttcttcaattagttttagaatgtccgctttttgtgtatgcggtttcaaagctgtatgatcaattatgttggctaatgacatccttcgcacacttccttttttgttaagatattttttagcataaccgacttttgaacatatgtaaattggtaattgaaattttgttcaacgaaaggtttgaacgtgtcacaaatcattaacaagcgccctcgcggtatgctggtcaatgattaaaacgttggcatattttccggttaatgctccgtgaatggaagatacttttctgcttccgccggcaactaaaatggagcgttccttcagcctgaggtcttcaagctcaacaccgatggtccggtcattgatggcgctgctgcaaatattccctttcgcatcaaaaaagcgtgaacaaatatcccccacggcctgttttttcagcagggctttctcttcttcgttaaaatatccgagtcggaacaacagcgcttcatcacggacagtccccaccgtgaagagagcaatattcgcctgctttcccatctcgatgatccgctcaatatgacggtctttctccaccattcgcttcacatccgcattatcaaacacgacgggaagcggaagatagcgcggcatcgtttgaaaagcctctgcaaacagctgaatcgtttcagccgaatacgtgtttacccgggaatggctgatgccgccttttagctggacgacctcgacgccttttacctgcttcggttgcatgttttgcgcgatttgatacatggtggttccccagctgacgccgacaatgtcgccgtcttttaccgtttcatgcatatattctgcaccatagcggcttaggtcatgtgtaattcctgcataatcgggtgtcggggaaaacacaacatgcgcctcaaggagcccgtatttctcttcaagtatggaaccgagcgcatccaaatcctcaaaagggtccatgacgcgaatctggacataccctttttcctttgcatattgcagcagccgggaaacggttggccttgaaatgttgagctgctcagcaatttgctgctgactgtagtcagactgatagtaaagccttgccgcttctatgcttaattgttgtttttcccgatccattccgcacctccctgtggatcagtcctgataaaactgcttttgatttgcttttattatacaggctggcgccggctttcatccacctgatttctaagaaactgaaaaacgctctgggcgcggacctgcccagagcttacttctcccaagtcatatgctgataaatgcctttcataatggcgtacattccatataggatcaggcctaatgccaatatagacagaatcaatttgccatgcggctgctgcgcgagttcggcgagcgcgccgtcaaagcctcttgtgtcgtcgggatcagcggtcatggctgtcttgatgagaaaatagccgatggctgagaaaataatggcgcgggcgatattgcctgcgcgcccggtgtttttcgtgatgcatatcatctgtttgttcatttttgatgtatcgaattctttcataaaagcagcccgaacgcctttcataaattgaacaatcgcaaatacgataaaacccgcacccgtaagccctgtgagccatcggccgaatggctgcgccaatacataagcggaccacgtctgttctgaagtgccgccgtccccttggccaaacacaaatcgcaaggcattccaagcgatggatgtgtaaacggcggcactgaaaaagtttcctattctccgtgacaggcctcgcctgctatttccgtgcccctccgtgtccttgatcgcacttaacaccatccagattacatagccgataaggccgatgcctattaaaaaaagcaatagtgacccatacggcatgcgtgatagcgtttggagagctccgctcgaatctttggcgcggcctgccccggcagccgtcataaaagccaaaaccccaagcagaataaaaacgccgccgaatgcaaaataaccaagcctcccgaatcgtttgatccaaggcttggtttcctgttttatttttgacatgtaccggtctttcaccgccatgtgtccaaccctctttcacagaaatctttactgtaacattcccgattggacaaagttgaaacagcttctgcctcagctatggctggctgagatatgtttttgctgtttagctgattgtgcaggtgtcatccaagcagccgctgcggcagctgtgactccgcctgctaatttcccaatgatcatggccgccgccatttcttttttcattccagccacaaaaccgaggtggctgccgagtacaaaagcgccgctgaccgcaaacgcgacattgatgacctttcctctcggcgtcatatcctttaatgaagccagcattgggatatggtgcgccaaagaggtcaccaagcctgcagttgctgtctcatctaaatgaaggcatttccccagagcctgtagcggttttttaaaggtttttgtaataaaagccgtcattggaaacgcccctgccaaggcaatggcgatggtccctgttgtttgtatccctgtctcgacattctccattcccggaatcagcacaataccggtcatcgtttcaacggagacagctgcaagcccgataatcgcaaccacactgaccgctttcccgaagagatgaaacaactgaatcatactgtcggtgtatcgccataacccaaaagcgatcacagcagataacagactcgggatcagaaggtttttacctatcatgccgatgtcaaagcctgcgcataatccgccgattaagcaaccgatcggcactgtgcacagcccgattaatatgcctttcgcaaaatacggatgatcctctttttcgatgatgccaagagcgacgggaatcgtgaagacgattgccggtcccatcattgttcctaaaaacacccatgaaaacagcccggcctgcggatctttcgccatttctccagccagcgcatatcctcccatatcaatcgccaaaatggtgttcgcaaaggaagaagggtccgcgccaatcgctgtgtaaaacggagcaacaatgggaatcaggattgctgccagcacgggcgccagcgacacaattccgatcatggacagcgccagcggccccatagccttaaagccgtccgcaaaccgctcgcctagcccccatctgtttcccaaacaataatccgccgctccccatagtaaaaaggcagccaaaatgaatacaaccgtgtcattcaccgtcatggttttctcctttttcaaacgtatgattggttttatcatatcatctgaaatcaccgaatagagttgatcttattcaatatgagctaaaaattcttttatatcggctttttcaacggctgttatgatgctccgcgctttttcttgcgggaccgttaatgtcaatttttctattatgtcttcttcagacagctcatttcctggcgccccttttgggcagtccacacgcgcttcgcaaatccggccgtctgataaataggcccggacaatcgtgaaacggccttttggaacggcatgaggagccggctgaatagcattgtcatatacgcgctgaattcgccccattgtcgtttgaaccccgcttgggatcggctggctgctgaaatgttcaacggtcaggccgtgtccatgcaaagcaagagcaatcacatattcaacgctgaaacggccttcctctccagtttttggagatctttccgtcaatgcagcatctccgcctggcggaaatatcacttcaatacgttcggtattggcagcagaaatggtttcttcggagataagctgtcgtaccgcatctgcagcatggtgtgccgcggaacaaaatggatagattttaaaccatagacccggctgcacaattctccacggtgccccccaatcgtttagcaaagtgtgttgtgctttctcaacgtcaccgtacagactgaagaaaccagtttctccatcaaatgccgtgcgggacccgccaaattctgattgggccagcttaacggccagcaagccagcctgagccgccaaaccggcgtgcagcggtttcatttctgttccaaattgcaccctcatcccagcagattgcgtagccgcaaaaccaattgctttttccagctcttcctgagtcagctcctcagcataacctacggcgcaggcagcagcgatggcaccaagcgttcctgtattatgccagcccttttcatagtggcggctgccaattgattctcccagccgtgccatcacttcaacaccaacaatataagcgccaagaagccgctcgtcatgtccgcgagcggcagatgcaataagggccggtacgatgactgcactggggtgtcctcttacatcggagtggacatcatcaaaatccaatgcatgggcgataaatccattgagcatcgcggattgtaatggcgcggcctttttgccctgtccgataataggaacaaggggcaggcctccttcatcctctatcagacggaggagcttttgaattcctttatcttctcttcctgcgaatgaagcggcagtaaaatcaagtaatcccttttttgcttcgtgaatcgcgtcaactgaatgctcaggttgtgacgttctcacagcctctgcaagacctgctgtcagcccttgtttgctcatttgatggtctccaatacaataaccgccagctccgcaaagtattgagaggcaaccgtaagggcttcttcatccagtgtaaaggccggatgatgccactcctccgtcccgttcgttcccatccagacaaaaaatcccggaatcttctcttgatacagagcgaagtcttctccgcccggagactgctcagcgtgaacggtttgatagccaagccgtgccgcagcttcggatgccgcattcaaaaatgtgccgtcattctgaacggaaggcaaataaggaaaccacttgaattctgcttgtgccccatagcccgctgcaattcctttagccactcgtctcatatgctcgggaacagcctgcctcgcttctttttgaaaggttcgaaccgtcccttccatttcagcttggtctggaatcacgttccacgacgtgcccgcctgtactcttgtgatactgacgactgcgttttgcagtgagctgatattgcggctgaccacagattgcagcccgctgatgatttgtccggctgcagcgattggatcaatactgttatttgggatgccggcgtgtccgcctttccctttgatgacgatctcaaaccggtcaacacttgccataagcggaccttcctttacaccaatggttccgacaggcagatccggcttattgtgcatgccgaaaatcgcggaaatgccatcaagtacaccagcttctatgacctttcttgctcctgcggcaatttcttcggccggctgaaagataaagcggactgtacctttcagctcggcctttctttgattcagcaacatcgctgtgccaataatagaagcagtatgaaaatcgtgtccacatgcatgcattgtgccatcaaccttagatgcaaatgggagattcgtctgttcttggatcgggagcgcgtcaatgtccgctcgtattgctatcacggggccgtcttcccgtcctttgatttctgcaatcacaccagtctccaattgaggaacatcaagtatttcgatttgctcctcctcaagccagcggcggatttttttcgtcgtttcaatctcttgaaatgacagttcaggatgttcatgaagatcacgccgcatattgattaaacgggtatgaaacgttttgtcggccattgttcttctctccttcttatataagctctgcaggctctcccacctgcttgataaatcgtttcgtccgttcgtttttcggatggtcaaacaattcctctggcgttccctgctcgataatatggccgtctgccataaaaatcactttatcagcaacctcttttgcaaacgccatttcgtgtgtaacaatgatcatcgttgtttgtttttccgcaatggacttgatgacctgaagcacccctgtgacgagctcagggtcaagcgctgacgttggttcatccagcaaaatcgcatgcggattgaccgcaagcgcccgcgcgatgccgattcgctgctgctggccgccggacattgtgatcggatagctatcagccttatgctccagaccgacttgtttcagaatctccattccaatacgtttcgcttcgtcgcgtggtttatgttgagccacgattaaagcttctgtaatgttttgcagagccgttttatttttaaacagattgtagttttgaaagaccatggccgtttgctggcgaagccgatatgcttccttgcgtgtaaacttttccgcgttcagtttggcttctccgatttcaataagtccttgatccggacgctctaataaatttaagcaccggagaagcgttgactttccggaaccggacggaccgatgattgccaccacttctccgcgtttcacttctagatcgattccgtcgagcacgacgagatctttaaacgctttgcgaatattttttactgttatcaactgatttcacctctaagtccggtatggcttgctcatggcacgttcaaacaagtcctgcaacatgctgtagatcatggtaagaacccaatagacgatcgcaaccgccaagtacgtctcaaaatatttgaggtttcctgaagcgtacatcttcccttgggcgaacatctccatgacccctaatgtaaaggccagtgacgtttctttcaggagcccgataaatgtattgcccgttgccggaatcgcatttcggatcgcttgcggcaaaataatccgtctgtatgcctgaaattttgtcataccgacagacaggcacgcctccagttgcccgtcatcaacagaattgagggcagcccggaagatttctgccaaatatgctgcattttttaagcttaacccgatgatagcggctgtgagagctgtcattttgctcatctctggaaatagctgcggcagcccgtaatagattaagaacagctgcaccagtgtcggtacgcctcggaaaaaggatatatacagctttgacagctgatgaagcactggaattttgttctttgtaatgagtgcgagaataagtcctccgataatggcaaaaatcatagctgctatggccataaacaacgtgatcggaagggcctgaattaaagtcgggaacgctgatatcatgaattcccaatcaatcgtgttcattctggtgagtcaccgccgtttcttaatgcttctgttctactgtgatatcttcattaaagtatttttcagagagttttttcagtgttccgtctttacgcaattcatctagcgccttattgacttttttgcggagcttgtcgtgcgcatcgtccttggcaaatgggaatgcaacctgttcgtaaacaatcggatctcctgcaagctttaatggcaaaccggtcttcttgatttgcgcgatcaatacagttcggctgttgacataagcgtctacacggccgtacgcaacatccttcagcgtaccctcttgtgtttcgtacgttttgatattgatttttttatcaggatctttgctttcaaggtttttcgcgtggtttgaaccgagaacggctgcgactgtcttgccttttaaatcgtctactgatttgatgtctgtattgtcttttttgacgacaatctgtgttcccgcataagcgtatggtttcgtaaagttatacgtttccttacgttcgtctgtcacagctacctggttagaaatggtgtcaagcttgcctgtttgaagctcccccatcagcccgctgaattcaagcagcttccagtccagtttcatgtcaattttcttagcgaccgcttccatcacttccacgtcaaaacctgtcagctttccgttttctttataagcaaatgggtaactttgtcctgtcgcaccgacatgaagcacattgtcatcctctttactgctgctgtttccattgccgcaagctgagagcaccgctaataatgcagcaacgaccagcacaatccattttttcattttcatttgattttcccgccttttctttttttatagatcatgtcgcaattgttttttcatatagactgtgatatgcccttttccaaggtcttgttcacctgagcggacatacccttttcgttcgtacatctctatcagccacggatgcttatccgctgttccgagtgagacaaacggaacctttaacgtatcgcgaaggattgtttcctccagccattgaagcagctttgttccgattccttttttaccggtgtcggggtccacagcgaaccaccagatatgcggaacgccatacggtcccggctgttttccccaaggcattctcaaggtgatggtcgcgatgatccgcccgtcttcttccatgacgtagcaagcgtttttccgaatattttgcagcaccaaatctaaatccgcatgagcagcagcaaaacgaatgccaagctttcgaatcggttcataagcccgcaatgtcagcgcgaggagctgttcagcatcacgttcaactgcaaggcgatattgtggcttcatctagcgttcctccttactttgcatagcggtttaccggcttttccaaaccgaagtgctctcgtaatgttgtgccttcatattcttttctgaacacgccgcgctcctgtaaaatcggaactacttgatcaacaaacacttcaattccttctggaagaagcggaggcatgatgttaaacccgtcacacgctttcttatccacccattcctgcatcttgtcggcgagctgctccggcgtgccgacgaagatatggtggcctctggagcctgcaacgtatttgtaaagctctcgtatcgtcatattgtccctttcagccatttcctgaacaagcttgaagcggctcttcaccgcattagaagcttctgcgtcaagcttcggcagcggcccatcaagcggatatgccgacaaatcaattccgcctaagtaattttggagaatttgcagaccgacagatgggataatcagatcttgaagctccttgtatttggcttgcgctgcttcttctgtatcggcaatgattgggaaaatacccggcatgatggcaattttttctggatcacgtccgaattccgctgcctgttctttaatggattgataaaattcctgagctgattccaggtggttttgtgctgtgaagatcacttctgctgttctggcagccaacgcttttccgtctcctgatgatcctgcctggataatgaccggctggccctgcggcgttcttgaaacgttcagaggtccgcgaaccgagaaatattctcctttgtggttcagctcgtgcattttttctttgtcaaagaattcacccgtttctttattacggataaaggcgtcctcttcccatgaatcccaaagcccctttacaacttcgacaaattcctctgcccgctgataacgcaaatggtgttcaaggtgcttttcaccgctgaaattcagcgctgttgattcaatagatgaagtgacgacgttccatccggcacggccgttggacagatgatccaatgacgcaaactgtctggcaatatggaatggctcgctgtatgtagtggaggctgttgctgtcagtccgatttttgatgtgacctgcgccaaagcagagagcagggtgaatggctcaaaccttgttaatacatttggatgtgatttgctgtcaattgaaaggctgtccgctaaaaacagcatatccagcttgccccgctccgctgttttcgcaagctctttaaaataatccaaattcatgctcgcatctgagggcgcgtccgggtgccgccaagacgcaacatgatgacctgtacctgctaaaaatacccctaatttgatttgtttctttttgcttgtcatgacgatactccttttatcatgtttttaggctgaataatccgaaaaataaactcctatattcctagtcgtttaatatgaataaatcaaaatgtacctttgtcttggacgtttgtcaatgagttaagattaattttttctattcaagcgaaaagacccttgcgtgaccatgagggaacggcattgattcattcaactagtgcaacctctatatcggcaagaaaactgagtctaatgaagcaaagactcagttttcacccaagaattttatataagatttcgccatttcctttgccttttcttcgcttttgcaaaccgcctatccattcagacgccgtaacgattgtataaaaaaacagctgactccagatattcaaacgggaatcagctgattgatgtgaattaattaagctcatgaatactttcttctgctttagcagaaaactctttaggctcaaggcggtctaggtcttcatgaaataaactcactttttggatttgccgattgtcatagtggtggaaatagtagtttccagtttcgttgcacatcacggaagtatattgcgtataatgaatttcgtcttcttccgttatcactgcgccctttggtatcgtcatatttgccaaaatttgaaaagcggctgttacacctttcgtttcatcggccgccggctctagatgttctttcaaataaacagctctgacaaaccgggaaggcggtgtataatcccccggcagaccaacagttcctaagccttggccaaaagcagaaagggctaatccgcccatctctttgctctctaattgcttcggtctgattcctgtatattgctgcagattggttacatgccatataaagtcggggctgttcgtcatgacaccaggttgattatcatagactttgaggccgtctgctcttggttctatcgtcaggcttcggcccgtccggtctgacaatatccagtgaagcggtaaaactgtatccaatagatctaattttttctctacaatcgttaaagatcgaatcttttcttttacgtcttccaaagactgacagactgacagcacccatgtcacaaactcatgcgggacaatgtgaacggtatcttcccgtatcgttttttcgtactccgcatagcccggaaaataaagcgccgcacaagataaaccgctttcattaacgccgtcggcaaataatatatttccaagttttctccccataccgataaacgcgtactgtgtctgatgggcctttccgtcagcttcactcttccagctgtaacggcgcggatagagaatgacctccgtccccagctgaaatgcaaaatccattgttctcgctaataaatgattccggtcagcagtttccaatgtaagacttgtgcacatttgatcagtccccttttcaattcagattaatatcatacatattgtgaacgaattggttttatcagcataacgaaagtcaaatcgattcgtcaaagaattgacattacatcaaataaaacgaaaaaatccagccttctaagaggctggattttttattatttagccaaaacaagctcgtgaatcgcatgtgcaacgccatgttcattattggagcgcgtttgaaagtttgcggcttccaatacttctgggatggcgtttgccatggcaaccccgcagcccgcccattcgatcattgtcaggtcgttcccgttgtcgcctatgcacatgacttccgcctgttcaattccaagcagctgtgccagctggcgtacagcatttcctttgctggcttccgagtgcagaatttcataaaagaaaggcgcacttctgaccattgtatatttttctctcacttctttcggaatcgatgtaatgacgcggcttaagttctccggtttatcaataaacatcactttcgggatgaggatatcttttggcacctcgtcaattttgcggaaatgaagcggcacctgtgtcacataggattcgtatacggtaaattcgctaatgtcccggttaggcgtatacaaattagatgagtcaaagaaatgcatcggcgtcttcagctctaagctcaggtcatataatgaagccaaatcatcataaccgagagacagctctgagaccacttcatttgtatgcgtattttgaacaagtgctccattatacgcaataacatagtcgccttcttcaattaaattcagttcatctaaatatctctgcacacccccgataggccggccggtgcaaagcacaattttgacaccttccgcttttgccgcgtgaagggcgtcgcggacctcctctgttacttcatgatgatcatttaaaagtgttccatccatatcaattgcaattagtttgtacatcctgcatctccttcatgtcgttttcaggctatagtcccatcatatcgttttttctttttgatattcaaccggaagagatggttttctccggattctgtttagacgccgcccttgtcttcggatacgcaagcgcggtttccgctttctttctgccttgacgccgttttctgcttttttctgtttcatcagcagaaagccggcagctagaaaaggaatgccggttatattcaagatggcaagcttcacacccgccgcgatgaaaaagaacccccatgaagatgatggattccgtctgatcatgacgtaagccgccatttccagaacgatcaggatggcatgaagcactatgccataaatcagcaatacaagggcaaaaaacaaaacataattcacgattgcccctgagtacatcatagcgcgcatcatttgtataaacgataaggactgcatggagccgctgatgacattagggttatagatcgtatagtcactaaataaatgtttgactttgagaaaagcccataatataaatatccattgaatgatatgtaaaacaagccccgctgccaccagtctttcagctttttgatttctcatctttctcctccctgccggtctttgattcgattcttgtcatcgtttttctctgtccattttgctcccatatcaatgtcccgttttctcctcttttcagcgtgcttttgagcggataataggggccgaggtactgaatctcgatagacccgtcagtgctttgggaaatcaccttgtatgccataaaaggcagctgtacctctcctcttccttcaatcacttccgtttccacaacctcgtcttcggtaaatgtgactgttgctgatttcacaccgtccgttggcccgggggcacgcccctcatcccacgttccgtaataaaacggcgtctcttctttttgctgctggcagcccgataccatgatgcatacagcaattaaaaacaaaatgccatatttgtttctcaaggggatcaccattctttcctccttttttgggcgaatgccgtgccactgtgccaatgactacataagttataaggaattcacccacaaggagactgatcacatgaacccttatcaatattacagccctcagctgcctcagcaggaaccttactatagccactatgagtacaatccttatccgcagcaggatgtatacgatccataccaaatggacagacagccggcattggaaagaagaatcgcagcacttgaacggcaaaatgaacagcagtcaagagaattaacccgtctgacaaacgaagaccgccgtcaaaatcgggaaattgcacggattgccgaacaggtcaatcagttaagccaggctgttgaacgccatacacgccgcctaaatcggctcaatcagcgcctccgtacagtagaaaaccggctgaatatcccatttactgcaggggaaggcggtttctgagcgaaacaaagaaaaaaagcggaatacgattctcccatctcagggtttcgttttccgcatttcttatatgttaaaacggaacatttacataaaaagggtttgtacccagtatacaatctttaccgttttcattcaaagatagaggggctgaggaaaataattgtagttcctctttgacggaatttcttttcattcaagttgcatgataataccgactcacgtcaatcgatacatggagggatcattcatgcataatacacaacacggcttgcagcagctgaaccaatgccgccaaactgctcagcagctcattcagcaaacacagcaaagcagccagcaatatcgccaaatgcttcatcaggaacagcaaaacatccaaatgctgcagcagattctaaaccacgaacaacaagctgcacataccattcagcaagcactgcacgggcatgatatggcgattcaaaagtgccagcaggttgtcaacatgtgcaaccaaatgcaacaggaacttactggacaatccagcgtcatgaatacgaatgtgtctacacttccattcggccaaaacacgccatttcagcagcaatcctatcagcagtaacatataaaaagctcaacacaatgcgagtgttgagctttttttcttactgttctttgcgaatatgtatatcctgaatagactgtttcggtgcatgaaatctgctctcggcttcacttcttgcctcggcaaaagcccgcgcctccacatgatctttgtagacatccagctgaatcaaatacagcgggcgcactttaaatccatgaataatggtcaccgcccataacgggaccacaataaaaacaccgggcagatcgggcaaaacaaaaccaaacgcaaaaatgaaaaaataaatgatgccgtacatgatccactttctatttctaaccttgatgccaataaataaaaaggcaaaaaaactggtaatggcaaaaggcatgaaaataaacagcatccaccagctatgcagccattcccaagcggaacctctttttgtaattcccatatttttctcctcctatttacctataataatcgattaggcataccgcgtcacccataaacgggaaaaactttctcccttaaaaatagtgatagacggggaacaggtttcttgctatattattaattgataatgataatcattactaatctattgagatacatagtgggagggttcttgatgaaaaagaacatattgctcgtgggcatgcttgtgctgcttctcatgtttgtcagcgcttgcagcggcacggcttctaaagggagctcaagcgattctgcttccgaaaaaacagaagtgagaacatacaaatcaccaaaagggaacgtcaacattcctgcacatccgaaacgcatcgtcactgatttttatgccggtgaattgctgtctgtcggggccaatgtggtcggctcaggctcatggtcatttgataatccgtttttaaaatcaaagctgaaaaatgtgaaggatgttggtgatccaataagcgttgaaaaagtgatggagcttcagcctgacttaattgttgtcatgaatgaagagaatgttgataaattaaagaaaatcgctccgactgttgtcataccttataacacagcgaaaaacgtagaagatacagtcagcatgttcggagatatcgccggatcgaaagacaaagcaaaatcctttatggctgactttaacaaaaaagcggaagcagctaaaaagaaaattgccggcgtcattgacaaagatgcgaccttcggcatttatgaaaacacagacaagggcgaattctgggtgttcaatgacaatggcggacgcggcggccaagctgtatacaatgcacttgggttaaaagcgcctgaaaaaattgagcaagatgtcatcaaaaatggagagatgaaacagctctctcaagaggttattcctgagtatgccgcagattatatgttcattacggattacaacccgaaaggcgaaagcaaaacactcgacaagctggagaattcctctatttggaaaaaccttgatgctgttaaacataatcgcgtgtttatcaatgactttgacacgttctacccgtacgacccgatttctgtcagcaaacaggtggatatcatcaccgacatgctgatcaaacgggccgaagaaaataaaaaataaaaaaacggcacagtcatgacgctgtgccgttttttatgattcactttaattttgattgtacggagtccggcatatcttcaaacttgacttcttcccaagtctcgacatactttcctttcgccttcaccttcaaatacgcgttcttccgaagctctttgccggcgaaaaaggtcacttcttctttttttccggatgcattatatccgtctaatgtatattcagtaccgcccggactaagatgtctgccatctcgatcaatctgaacatagacatcttgctggtgaataaacggattaaatctgtctgtaacatcgttatgaaaaaagagaagcccgcatattacggcagcagccgccaagacggccaggattgccattgcttttttcatctttgcactccccttacttgttcatttttttcaaatagcttgaccgcaccgcgaggaagaatagaagctgaaaaatgaaaaaccctccgatggtgagactgagcggccccgcgacatcagaatagccttccacagccaatgttctcaaggcaaacagtgtatgcatgacggcaatgacaaatggaaagaagaaaagaatggccaattgtattgtcacgctttgtgccatttctcgctcactcagaccgattttggccagtgaacggtagcgctcccggtcttcatctaaatcagtgaacagcctgaaatataagaaacttgctgccgcgacaaagaatacaattgcgataaacaggccgataaataaactcaggctcggcagctgcaccgtatcatagtaagtcccggcttttgaagcaaaatcagaatgcacgtcgatataattgccgtaaatctcattttgcaaggattggctgatctcaagactgtctttccaatgatcatagctgtagccgtataatgacgcttgatcaccgagtgatttcagctgatcaaaggtttgatcattcaccgcgatgatagcattcaatgagatcagcggttttttgacttcttttaccgacagtttttgatcagacagctcccctttttggttcagcagcttcagctgatccggcgcttcgtttttgaaattgcggtcatacgttcccgggaaatagacagcctcgtcttctttcaggccgttcactttgacatggaagtattttgccgcatccgattcactgatcatgtaaacagggggaacagtttctccttcctgatagcgaacataggaaacatctattttgtctttcttatacgtaaagccgtgtgttttcagttcatggtcaatatctttcaaatgagtctgttcttttggattgttgctgtaagataaatactccatttcataagcggactcttccgctccgacggtcgatttgtacattgcgagcacgcctgtcgcagtaaacgcaaccgcggaaataatgctgacaataaagaacaggcgggcgttgtcttttagacgatagacaaggtcagaaacccaaatgatgtttttcccgcgcagataaaaggttttccacttcttcagcgcgcgcagaatccatatgctgctttggctgaaaaagaaatatgttccgataacggtgagcagtaaaatgataaacggttcggccccgtggacattgcctttaagaaccatgccgtacccgccgcacagacaggcgatgccgaataaggacagaagcacggacggcttaggctccggtttaaccttgccagtgccctttattaatttgataaccgtatttgatctgacaaaaaggatcgtaaactgcgataaaaagaaaaataagagcagaaatccgcaggccgtaataccgagcgctttccaaggcatatacaaaggcagcgcgtccatttctaaaatataagcgccgaccgtaaagaacgtctttgaaaaaatgaatccaccgattatgccggctgcaattgacatgacgccgatgatcatattttccgcagtaatgagctttctcagctgccccggcgtgatgccctgcatgagcagaatgccgaattctttatttctcgatttcaaaaatgcattaaccgaatacagaacaaataagaaagaaaaaacaaagatcatccattccgcggcggttaagccttttttggcgatgttattcaggtagccttcctttaatgccggatgaaacaggaacatcgcaaaggtaaagaaaatcaaaacggaaaaggcgctgcttaaaaagaatgcaagataagcccttttgtttctcgtgacgtttttataagcgaactgaagaaaggtcatttgcgtttccccccagcatagacagcacatcaagaatttgttcataaaagacttggcggttttccccgcggtaaatctcattaaacaattcgccgtcttttataaagatgacgcggcggcagtagcttgccgaaaccggatcgtgggtcaccatcaaagccgtgacatgatcatcccgattcaggctctgcaacgtttccatgacgtcttttgtcgctttggaatcaaggtttccagttggttcatcggccagaatgagtgacggcttatgaatgaccgctcttgcgatggcggcccgctggcgctggcctccggatacttcaaacgtccgcttgttaagcaggttttcgataccgagctttgccgcgatgccgtgcagtttttcttccatgacagacggcgcttctttttcaagcgttaacggcagcatgatattttcaccgatcgtcagcgtgtctagaaggttgaaatcctgaaacacaaatccgagctgcttgcggcggaaatgagcgagctttgtccgcttcaggcgatgcgggttttctccgttaatcaggatatcgcctgaatctggacggtcaatcgttgaaatgatattcaaaagcgttgtttttccggacccggacggccccatcaccgccgtgaactcgccttcttctattgaaaatgaaatttgctttaaggcctgataggacacttgtcctttataggttttatttatatgtttgacttcaagcatattcgccatgaaaatcctccttatggttttattcttgttgatctgggctgctttcatgtagtgccgggacgttcaacataaaaatccccttgacataaatccatgttatcaaggggaaacaaagcgggctatgttgttttcttaacgcagccttacatttttgtaagaaatgaaaatcgaactgatgtcccttcaccgggagacgagctgatgtccaccgtatgattgagcttatctgtaatttctttgacgagatggaggccgattcccgtagattcttggaaacgccgcccgttttcacccgtgtaataagggtcaaacacccgcttgatgtcttgtgagggaatcccgacaccgtaatctttgacttcaagcaccgtcctgtcttcatcgcggaagacattcagctcaagtctgtcactcttgcccgctgaatacttgaccgcatttgtgaccacttggccgatcgcaaatttgagccatttggcatcggtgtaaatctgatgatcatcgcaaacgttcattttcggataaacgcgatattgaataaaaaatcgtttatagctttgaatgactgattggagaagctcggacagggaaaccgcttcgattttaaaatcccgttcaaacaggtcgagccttgaagaataaagaagcgtctccagcccgaattcaatctgccggacttcttttttgatttgttcaaaaacgggctcatcctcttcttgaatgattaaattaatgaccgacagcggcgtcttcacttggtgcacccattgattcatatacgtcacccgcgcgtcaagcttggcttcggtctcatggagcttctggtgctgcagccggatcagctccatctgcttttcatacagctctgaacagaacactgaagaaccgagatacgggatatccgtcccttcctgccccgagctgagccaatgatacacgccgcggtctttgtaccagcgataggcaagatagcccgccaaaataagaagctgcacgcccaatatgtaaaacaagtgagaaaaagaatgcagacccgcaaaccagtaataaaagaagacaaacagcccttgaaggagaaaaagcagaatcagcactgcatgagaccggagaaacagcttcatgactgcgccctcagctggtagccttcgccccgcaccgcttcaatagaaacaggcgcattcagctcccgcagtttttttctgagccgcgtgatatacacgttaagtgtattatcatcgatgaatatgtcggtgtcccacgtcttttccatgagacggtcccgactcgtcaccttttctccccgctcaagcagcacttccaaaagcttgctttcttttttagaaagctcgcttttttcatcctgaaaacgcagttcaaaccgttccacaaagagctgaacgccggcatattcaaccactttctctccctgctttgcggcgtactccccgtacgccctccggatctggcttttgattttcgcaagcacaatatcataagaaaacggtttttcgatataatcgtctcccccattttcaatcgccatcacctgatccatttccccgcttctggcagaaataaagatgatcgggcttgtggagtgctggcggatctgccggcaccaataatatccgtcatatgccggcaaattgatatcaagcagcaccacatcgggcttttcccgcaaaaagacatcaagaacagctgtaaaatccgcggcgaccactgtttgatatccgtatttttcaaggtaattctgcaatagtccgcgaatgtcttcactgtcttccacaatcataattttattcaaactgaaccactcccgtttcttacactgctgccatcatcataatcgttttgggcgtatggacgcaacaccgcacaaaaaaaccgccatctcggcggtttctgatctctttagccgacctgctgcttagctgctttaccggctgatccgaactctctcattttgcttcgcactgtctcttccacggcttcaatgccgggtgtcaaatagccgcgcggttcgtacagatcgctgttttcctgaaacatgcggcgtgtttcgtctgtccacgctaccatacattccgtattgatattgatcttcgcgtggccgagtgtgatggcttttttgatctgatcctgcggaatcccggatgccccatgaagaacgaggggaatatcagtcatgcgagagatagcctccatttccttaaatccgagattcggctcaccctgatatttgccgtgtacagagccgagggcggcggccagcgcgtcgatattggtttctttgacgatccgctcacattccgcgatatcggcatagcggaccccgccgaccaggccgtcttccattccaccgaccgtgccgacttcggcttctactgacacgccgtgttttgcggcataatcggtgacttcttttgtcatcgcgatattctcgtcaatcggctgatgggagccgtcaatcatcactgagctgaatccggcatcaatggcctgtctacagcgttccgcactgctgccgtgatcgagatgaagcacgaccggaacggtaatcgccatgtcctccattaacgcgccgaccatggcggcaatcgttttaaatccgcctaaatagtcgaccaggcgatcggaagccgcggcgatgaccggtgattgctccttttgcgccgcctgcaaaatcgccttcgtccactgcaggccgttgatattaaactggccgatcgcatactgctcccgctttgcatcttcaagaagctctttcatcgatacaaaagccatgtccacccctcctttatccattacatgttgaagtattttgatacgacgtccactgttgtttttttcgctgtttgaatggcttcctcagcagtcagcttatagtattcaggccggaatagctcaaccgatacaacatcagagaagccgatttccttcagtgctgataagtgggcatctaagtcaattgccccttgtcccggccatacacgatcctcatctgttaaaaagccgattgggaaatcttctgtatcatcgatatgatagatgaagattttctttccgtccgcctgctttaagctctcaatatttgaacccattgcatggaagtgaaaactatcaaggacaagcccgacattgtcacggttaactgtgtttacgatctcatacgcctgttcaaacgtattgaccgtacattgcggatggccgacaaattcaagcgcgatttttacgccgtacggctccgcgatatctgacagctcagtcagcacctctacactgctctttttgatctcttcttttacaatcttctgctctgtcacaagcggaacggccaccacatatttcacaccgagggttttgcatgtttccatcatgcctttaaattcagtgatgatctcgttgtggcccttttcatcacggttgttgaagaaaacaagcgcgtttagggcaagcggtttgatgtgatgggtttgaaaatattccgcaagatctgccaatgaatgatcttttaagtactcgggcagcttatccattgtgcggatttcaatataatcatagccgtgcttttcgcatagttctaaatcctgtttaaggtttgagttttccaatgttgtcgcttcattaaaacaaagtttcatgccagactcccccatctgcgttttagatatgaagggagttcggcaggaaggctgtcgccatatcccgccgaactccatgctcagcttatgccagacctaattcttctttcattttcttaagcataaatcggcttgattcatccgctctttcatcgacccaagcaaatacggcattcgtcgcaattccgtcgaacttcatctctctcagttttctgaaaatcgtatcaaaatcaacctcgccttggccaatgtccaaatgctggtgaaccgttactttcgcgtcaggcggattgacgatgtagcgaaggccatgagccgctttatgattataggtatctgcaaataaaacatgtgtgaggcggtcgccggcttcgtcaaacatggtctcgatgtcgcctttgccgtcatcatagaagaacgtatgcgcagtcgagtagacaagattgatccaatccttgtcaagcgcgcggatcatatccatcgcacctttgtgcgtttcgataaaatcgtatgggtgggcttgaagattaagtttaataccttctttttcaaagactggcagaagctcatccatggatttgataaatttttcttcacttgttaaaggatcatattttgaaccgctgaattcgctgttcatcaaatccacttcaagttcaaccgcaatttcgattgcccgtttccaattgcgcaccgctgcctgccggcggtcttcatcaggacccgcccagtggtaaagaggaagaagcgatgaaagcttaacacctgtatctcttaaaaggcgctttaattgtttgatctttgctgaatcaactttcggatatttataaaacggacaaaaatcctcacgcggagacaattcgatatattcatagccaagctccgccgttttatagaccgtttcctctaaagttaaatcatcacgatacatggatggatccaatgctaacttcatattttcactcctctgttttttagttttgaactgttgtaaaagattgatagaattccggtttttccttcaattcaaccttttctttttgtccagattcctgggcttttacacacgcgtcagtcgtgacagcagcaatatagccgtcccatgccgtcggtccgctgacctcgcctttcttttgaatcgaatcaataaagtcttggatttccacatcatacgcagcgacaaagcgtctctgccaatccatcaaaatatcagtactgaatctgccttcttttctcaagctgatgcttgatggctcgggaagcttgatgatgccgtcttctccgacgatttcgcattgaatgtcatagccgtatttacagttcacatagatttcagcattgatgacgataccgccttttgtttcaattacgacgatttgcggatcttttaaatgcggcagcgcgtttttcgattttttcgggtagatgacttgaacggactcgtagtcatcgttgacgagccagtgcagcacatcaatttcatgaacaagcgtgtcgactacggccatatcggttgtgtagttatctcctacagtcgggttgcggtgcgcgcagtgaatcataagcggttcgccaatcacatggttatcgagtgcttccttcagctgtacgtaaccgctatcataacggcgcatgaagccgacttgaacaaggcgtttgcccactttgatttcttcttcgacgattcgcatgcatccttcagccgttgtcgcgagcggtttttcacagaacacatatttctgggctttaatggctttcagcacgcttgactcatgcgcaggcccccagcttgtcactaaaacagcgtctacattttcgtctgcaagcaagctgtcatcattcggataaaccgtcgcgtttaattggtattgctcaacgaccttttgtgcagcttcttgattaacatccgttacagctacaatttccgcgccggacagcttgttcgtgatgcggttaatatgttcttttccgattgctccagttccaattacgccaatacgtaaactcattgacagccactccttctgttgattacataattttgctttctgtttcttgctttacttggctctgaggagatccgtagagttcctcttgaatttgttcaagcgacttgccagacgtattcggcgcaaagagcagcccgatgatcatactggccgtcacacatccgagaagaattgcagccatcgttccaatgccgaaattggtgataatcattgggacaaacagactccaaatccctattgaaatacggacaaggaaaaacatcagcccttgtgcggaagcacgatattgcgtaggaaagatttcactggcccataactgatagttcgcttgctgccctgctccgttattgatgccgatcacgacaataaacaggagcagaatcggcaggccttcaattggcagcagaaacagtgtccacccgatcaccgccatgaaagcggcgattccaaatacggtttttctatatttgtcggcaaagggcatgaagatcaaggcgacccccaatcctgtgaagataaacagccccatttgcaaaaggttggccatgttggcagatacaccgccgacctgctgataaatgtatggcataaagaagcccatgaccccggcagctaagttccaaaccaagtacacacccatcaaaaacaatatgctttttagatacataggcttgagcaaatcaaaatacgatgtcttattcagtacagccggcttctctgcctgagcatcctccggctgattttttgtctgccaggcgtctgattccggaagcctgattctcaggatgtacgtaatcagcgcaatcacaagcagatgggcaaatacgattttattccccaagagtcccaagtcaccggccagtacggagagaagcagtacaacgacagcgcccgcggcccaagcgacttgtgctacgccgcaatgcctggcccgattcttctttggcgcattttccgcaataatggtccatgacgcggttatatcagctcctactgataaaccgataatgatgtaaccgcttaacaacatggggaaattaaccccgaacaaaaccaaacaaatccctagtgcataaaccagcatactattggtataaacagccttccgtccgactttatcagccagaaacccgccaagcagcgcgccgacagcggcagaaatcgcattcgcgctcagcgcgccgagcagcccgatttgcgtatcggatagcttaaggtaactgacccataatgataaaccggcggagcctgccacaattgaaccggcatcaatatagttggccaatgctgccgcgattgtccgtttattgaaggctgaatctccattggtattgcccatatgttcattccccattaagccagatccaacaactgctgatcaatatagtttctcgcaatcaatgcatactccagcgggtttgcaacatcggggtcctgttcagcttcaatgacaatccatccggaataactgtgcttcaacagcagctgatatacttctctaaagtcaatgcagccgtcaccgggaaccgtaaacatgccttttaaaaatgattgccggaacgattgtccttcgagcctgcattgttccatgacattcaggcgggcatccttaaagtgcacatgcttaatgcggccgatatgcttctcaagcatccccatgtaatcgccgtcagaaatatacgcatggcctgtatcatagaggaggtgtacatgcgcagggtctgttcctgccatcaggcggtccacttcttccgctgtttggacaccagtgccgagatgatgatgatagacaagcttcaagccatgctgagcggcaatttcgccaaggtgattcagcccttcgcaaagccgctcccattcatcatccgtaaagtgcggcttctctgtgaacacatttttctccaagccttgcacgctgtacgtttgttcagagacaactgcgacatccgcgtttacttgctgcaaatactcacaatgcagggtaaatgtctttgccgcttcaccaagtccgtcacgcaaaataaaactgctgaaccattttcctgcaatgcgtaagttccgaagcttcagctctttgttcaggacggcaggttcggggaaaaagcccccgacttccgtgccttgaaaacgtgcgacaacgatatcacttaacaaatgctgaagtgtatttcccgctccaatttcaggcatgtcatcattccgccacccaatgggagcgattccccacaggatttcatttttgcccatcttggtgcctcccctctaatactgcttcgcagattccagctttttctcttttgcttcgtatgccttctgaacgctttcttgttcagatacctctgccaccccgacatgccaccagctgtcatagccgtccgtcattgttttaggcagaaccttcatttcaattaatgttgatacatcctgtttcttcgcatcctctaacgccgcttttaattcttctactgtgtttgcacggtaggttttcgcgccgtatccctcagcgactttcgcgtaatcgacattcaggatttggttgtcatctgtgcggaactcgcaatagtagctgccgctgccgtgatccatttgcaggttgttgatgcatccgaatcctgagttgtcaaagagcagcacattgattttcttgttgtattgaatcgccgtgatcaattcagaatgaagcatcaggaagctgccgtctccgacgattgaatacacttctctgtcagggtgggccagtttaagaccgagtgtcccggacacttcatagcccatgcaagaatacccatactccaggtgatacgtattcggaacattagaatgccacagacgctgcaaatctcctgggagtgagcccgctgaacagatgatgacgctgtcttcaggaatcgtctcgttgattgtcagcaatgccgttgtttgcggaagctccgtattcaacgcgtcagcatattcattcaggacctcttgagaaaaatgatttttgatttccggatcaaatgcttcccgcttaaacgtcactttgctgagacgctcgcgttcagctagccattcgtccttcagctcccgaatcgttgtgccgaactcgctctcatagccttcaagcaagccatgcagtttgccaagcgtcgctttcgcatccgctaccacttggaatgcatcaagtttatacgcctgcattcggctgacgttaatgttcaaaaacttcgctttatcaaaatcaaaagcggtcttagaggatgtcgcaaaatctgtataccttgtgccgatgccgataatcaaatcagcttggcgggccgctttgtttgccgcaagtgtacctgtgatgcccattccgccaaggttgttcgcaaaatctgcctcaacagtagactttcctgcctgcgtttcaactaacggaatgttataggcttcagaaatggcaaccaattcatcgcgcgcaccggaatattttgcgcctccgccgacgagaatcacaggttttttgctggatttaatcagctccgccgcaccttgaagctcgcgctcgctcggctgcatgcgatcaatatagtgaacccgtttgacgaagaaactttcatcaaaatcgtatgcttccccttcaacatcctgagaaatacaaatcgttgccggacctgcttttgccggatcagtcatgacttcaaacgcgcgcagcaaactgctcatcagctgctcagggcgcgtaatgcggtcccagtatctcgatacaggcttcaatgcatcgtttgtcgtaatcgccgcactgtattcttgctccatttgctgcagtacagggtctggctgtcttgtcgcaaatgtgtctgccggaatcaagagaactgggatattgtttgccaatgcagtgccggctgccgccaccaagttagccgctccaggtccgacggatgtagacaccgcatatatttttcttctcagcatttgcttgctgtacgccatggccgcatgcgccattccttgttcatttttcccttgatagactttcaaatggcctgcatcctgctcaagcgcctgcccgatccctaatacgtttccatgaccgaaaatcgtgaagatcccttcgacaaaaggctcttcctttccatctacatggatgtactgctggtttaagaatttaatcagcgcctgtgctgttgttaagcgaattttcttgcccacaaacgatcccacctttactcgatctttttcaattatgactgtgcttcaataagctgtacgatttcatcagcagtcggcatcgcttctgacgaactgtgcttgctcaccacaatggaagctgaagcactgccgtatttcaatgccgtttcgatgtcttttccggtgacaaggccatagataaaggctgacgcataggagtcaccggctccaaaagttttcagcacttttgtcttgtacgcttgagcgcggaatacctcgccggatttgctgtatgcgtaagagccttcgacgccgtgtttgatgacaacgaggtcggctgaatggccaaataaatgattgacggattcttcattgcttccgcctgtgcggttttccatcacatcaaattcatcgcgtgtgccgatgacgatatcagactgctcggcaaccaaagaataataaacggctgtttcatctgatgactgccacgtatacgggcggtaatccagttcgaacaccactttaacctgatgcttcttcgcgtattgaacagcttttaataccgcttcccgtgacgggcttttggcgagcgctgtcccggaaacaagcagcattttcgcatttgcgatatagtcttcgcttacctctgaaggctcaagataaagatccgccacatcatcgcgatacattaaaatgctgcattcttcagggctgaggatttctgtaaatgcaaggcctgctttgtgtccatcttgatcaacaaccatctgtgttgtatcaacgccggtctttctcatataggactctatgaatcttccatgctggtcatccggaattttgccgatgaagcccgcttttaagccaagcttcgcgctgccgatcgcgatattcgcaggtgaaccgccgacatatttcgaaaatgtcatcgtttcttccattgggcggttgtattcgactgcgttcagatcaatacatgcccggccgatggcaacaatatcaaaagccttctcttcattgaatgtatacttcatcgtaaacagccactcctcacttgttagcgttctaaaatccattcatgcgccgggtcgttataaaacttccattttcgcgtcggccctgccatgacatttaaatagtaggatgtgtatccgtccggaacgcctaccgggtggtatcccgcaggaacgatgacaacgttttcatttcccacagtcattgtctcgtcaatagaacggtcatctgtgtatacgcgctgaaacacaaagccctgtcccgggtctaactcatggtagtacgtttcttctaagaaagattcttccggcaagttgtcttgatcatgtttgtgaggcgggtagctggaccagttgccgctgtctgtatagacttcaactactaatagactgttagctgaagggtctgaatccggaagaatgttatgaacagtacgtttgtttgaaaattgcccgcgatgctcaattccgttgtcttccgctttgatcagctttgtcggaagctgcttttccgatggagaatagcaaagcgccactcttgcgtcgctgactgctgtgatctcaaatgcacggtcatttgatatatagacgctgtctgtcggttttcgttcaaatacgctttcacgcgtgccgatattctcaaaagtcgactcatgatctgtcactgtaatttttcccgttaccgccacaatacagatttcttgttttttcaattcttctgtatagcttgaacctgatgcaagatctaacactttaaactctacataagtgagatcagagttggatgtcgttacttcgtgcacgagtttgaccccattagacacttcatgcgactgcggcttacgcaacaaataactcatagagaagccctcctctttctattggcagaatgagtccgaacagcgcacatggacgccgttcggctgttcgtcgtttagttgaaatcaggtgccggatatcttgccgtcaccacttttttacgtgtatagaagtcgacgctgtcttttccgttcgcatgcagcgttccaaagaatgaagatttccagcctgagaatgggaagaacgccattggagccggcacaccaaggttgatgcctagcattcccgcatcaatgttttcacggaagtagcggattgcgtttgagttggatgtgaacaagcaggcgccgttcgcaaactcagacttattggcgatttcaatcgcttctttcaggtttttcacacggatgacagataagaccggagcgaaaatttcatctttccagatcgtcatttctgttgtgacattgtcaaagatcgtcgggccgacaaagtagccgtcgtcagacacattttcacgtccgtcacatacgagtctggcaccttcttcaagacctttttcgatatagctgagcgtgcgcttcttgttgtcttcgcgaatcaccggtcctaagaacacgccgtcatcaaggccgttaccgattttaatgtccgccactttttcctgcagcttcgccataaattcatcggcgattccttcttcaactgtcacaaccgcacaagccatgcagcgttcaccggcagaaccgaaggcagctccaacgatgtttgtaaccgtgtcttcaagattcgcatcgttcaagacaatcgtatggtttttcgcgccagtcagagattgaacgcgttttaagttttcgcttccttttttgtagacgtattcgcctactggcttggagcctacaaatgaaatcgctttaatttcgggatgctcgaggatgccgttcacaacgtcatgcgcaccgtatacgacgttgaacacccctttcggaaggcccgctttttcaaaaagctcaaccaatttctctgttaacagcggagtccgctcagatggctttaaaataaatgtgttgccgagcgcgatcgccatcgggaacatccagcaaggaaccatcatcgggaagttgaatggcgcgattccgccgacaactccgattgggtaacggtagttcgccgcttcaacgtccgttgcgatggaagcaagtgagtcacccatcatcagggaaggtgctccagcggcgaactctacgttttcaatcccgcgtcccacttcacctaaagcttctttcgtgttttttccgttttcaatggtaattagatgagcaagttcttctttatgctgagacagcagctgctggaagttaaatagaattctggcgcggcgaggaaccgccacctttgaccatgttttaaatgcttcagccgctgtttgcgctgcgtaatcaatatcctcttttgtagaaatcggcacttggcatagcacttctttcgtcgccggattgacgacatcttcatattgatctgttttgctttcaacccattcaccgttgatgtagttttttaattttctgatttctgccattcttattgcctccttcattagtaaacacatacacttgtatggatggttccggatagattcatatcaatatccacttttcagcaagccaagaattaaacgctttcaaaaacaccaaaaaaataaatggcggatgcatatttacatacaagcaaccatttcatgcacaacaggttactttttggtcatttcttggttatattctaatcgcataatacccataagtcaatcataaacactacattttttcattatttttattatattaatcttttaatcaagtaagagaagtaagagaaggccgtccaatcttgcaaaagatatacaccgatgttatcattttttaagcaactattgattaacttttggtttttattatatatttatgttacgtaaagattcaagaaggagttttttatatgaaactgatgcggattcaggaaatggaggagtacattttatcgcatggcactgtttccttagatgagctgtgccaggtgttcaatgtctccaaaaacacagtcagacgtgatatcaacaagctaacagaaaagggtgcgattgaaaaagtatacggcggcgtaacatctattgaaaaaaccgcattagttccttttgaaaatcgcaccattcagcaccaggatgaaaaaacaaaaatcgcccattatgcttcccgatttattgaagatcacgatttggtcttcattgattcaggaacgacgacaaagtctattcttgatacgcttgatccagccaaaaatgtcaccatcttaaccaacagtttagacattatcaatgcggcgtcagctttgaagaatatcaacttaatcattatcggaaacaactataagagaaaaacccgctcctttgtcggcatggacgacccggctatgcttgataagtacaatatcaacaaagcctttatgtccgctaccggaacgacgctgactcacggattgaccaattcggatctgctggagtatgaaattaaaaagaggatttcagaaaaagcaaaagaagtgtatctattggctgaccattctaaattcggaaaatcaacgcttctgacgtatgcaccgtttgacaggctgcattgcattgtgacctctcagccattagacgacgagtacacgcagtactgcaatgagcatcaaatcggcattcatctggcctaacgtttacaatagtgttgagagtctatcatccattttattctaggaggcagatcatgaaaaaagcgaagctcggaaaatcagacttgcaggtattccctatcggattaggaacaaatgctgtcggaggacataacctctacccgaacctaaatgaagaaaccggaaaagaattggtgcgcgaggcgatccgtaatggcgtgacaatgttagacaccgcttatatttacgggatcggccgttccgaagaattaattggtgaagtgctgcgtgaattcaaccgtgaagatgttgtcatcgctacaaaagccgctcacagaaaacaaggcaatgactttgtctttgataattcaccagaatttcttaaaaaatcagttgatgaaagcctgaagcgcttgaataccgattatatcgatttgttctacattcacttccctgacgaacatacgcctaaggatgaagccgttaacgcgctgaatgagatgaagaaagccggaaaaatccgctccatcggtgtatccaacttctctttagagcaattgaaagaagcaaacaaagacggtttggtagatgtattgcaaggcgaatacaacctgttaaaccgtgaagcggaaaaaacattcttcccgtatacgaaggagcataatatttcatttatcccttacttcccgctcgtatcaggtttattggcaggaaagtatacagaagatacaacgttcccagaaggcgacctgcgaaacgaacaggaacacttcaagggcgagcgtttcaaagaaaatatcagaaaggtcaacaagcttgcgccgattgccgaaaaacacaacgtggatatccctcacatcgtattggcctggtatttagcaagaccggaaattgatattttaatcccgggagcaaaacgtgccgatcagctgattgataacatcaaaacagccgacgtgacgctttctcaagaggatatttcatttattgataagctgttcgcataagaagaaaacagccttctccattggagaaggctgtttttttgtgcgataaattcctaaataactgattttgaagcaaaaccttacaaaatgagccataaatccgataaaataaaggtagtttatctcagaaagaaagtgattgagaaagcaaaagtatgaaacgttcatatcatctagctcatatgaaataaagctgacccagcttcttttatttgctggtcagaatagcggaccatttcgatggtctatggaggaaacagaatgaaacttaaatatgtaaaagccttagttgcagtaaccgttgctttaggtgtactgctgccatcaacgatttctcatgcaaagagctttagcggccgctcatcatctagttacagcagccgaagttcaagctcgtcatacagcggaagctataaatcaagcccgaaatcaagctacagctcaggatcaagctcttctagcaaaaaatccaagacgcctgacgattcatcatcatcgatttcgcttaaaaagaagccttcggaaaaggcaagctcatcaagctctaaaaaatcgtcaggcaccttttccggcgctacatcaaaagtaaccggaaagacatacagcggaaaaacgtctaaagcctatgttggcggacgatatgtttcagtcaatcattactatcacgcaggtttcgcgccatcaggatggtttggatattatagcggatttacaatgggtatgttcatgatcagcatgatgcacccatggggttacacctatcatccagtcggaggcccaggttatgtttcttatggcgcttcacccattgcctggatcgttgatatcatcgctttgattattattttaatcattgtcatcgcactgattcgcgcatttaaagcaccgaagacgtacagaaggagattttaggcaatgagattaatattaaatgagcaagaaattgtagacggaatttgcgtgtatatttccaatgaagaagatatctaccctgaagacgttgaagtaaaggagctatcttataacaagcgtacagggttcttcgctgaagctacatttggcctgcaccacaagcagcttatgtcagatgacatttcagaaggcattattcagttcttagaggaataccacaacttcaatccggacgttaccgtcgttgaattgcaatttgataagaaaaaaggcttctccgccttggttttcgtcaacgaagcagaagaataaaaatgtcttaatcaaaaccttactccgcgcgggtaaggtttttttaatggtttctctgagcataaagttatttcgtttttcctaaactcagcggatctgtgatcatctcttttggctttaacgtttccgtttgttcaaaacaaatgtttcaaatgagataggaaatgggtactaatctattaactttgttatacattttagatactcattggctcaacaactgaggaggagacatttgtgaagaaagacacaaggaaatatatgatctactttttcggcgctttagggggactgctatatggttacgatacaggtgttatctccggagcactcctgtttatcaataacgatattcctttaacgacattgacagaaggattggttgtcagcatgctgctccttggcgcgattttcggttcggccttgagcggcacatgctcagaccgctggggcaggagaaaggttgtatttgtcctttccatcatttttattatcggtgcgctcgcttgcgcattttctcaaacaatcggcatgctgattgcatctagggtgatactcgggttggccgtcggcggttcaacggcacttgtgcccgtgtatctttccgaaatggcaccgacgaaaattcgcgggacactcggcacaatgaacaacttaatgattgtcaccgggattttgctcgcctatatcgttaactacctgttcacaccgtttgaagcgtggcgctggatggtcggtctggctgcagtgcctgccgtgcttctattaatcggcatcgcgttcatgccggaatcgccaagatggctcgtgaagcgcggccgtgaagaagaagcgagacgcatcatgaacatcactcatgatcccaaagacatcgaaatggaattggcagagatgaagcaaggggaagcggagaaaaaagaaacgacactcggcgtgctgaaagccaagtggattcgccctatgcttctgattggcgtcggtcttgccattttccagcaggcggtcggcattaacacggtcatctactacgcgccaaccatttttacgaaggccggtcttggcacatcagcttcggcgctcggcacaatgggaatcggcatcctcaacgtcatcatgtgtatcactgccatgatcttaattgaccgtgtcggccgcaaaaaacttctgatctggggaagtgtcggcatcacactgagccttgctgctttatcaggcgtgctcctaacgctcggactttccgcatcaacagcgtggatgacagtagtctttctaggtgtctatatcgtcttttaccaggcgacatggggtccggtagtgtgggtgctcatgcctgagctcttcccgtccaaagcacgcggagccgcgacagggttcacgactttggtgttatcggcggctaacctgatcgtgtcgcttgtctttccgctgatgctaagcgcgatgggcatcgcatgggtctttatggttttctcagtcatttgtcttctctcatttttcttcgcgttctacatggtgccggaaaccaaagggaaaagcttggaagaaattgaagcaagcctgaaaaaacggtttaaaaagaagaaaagcacccaaaaccaagtgctgaatgagcgtacattataaaaaaaggaatcgtctccttatgggacgattcctttttctgtttacaccatgaccttgcaaatattgttcgtaaattccacagggtcctgaatcggcaggccttcgatgagaagcgcctgattgtacagaaggtttgtgtacaggctcagcttctctttatcttgttcaaacgcgtcctgcagcgtttggaatacctcgtgatttgggttgatttccagcactttttccgccttcacattttggctgtcaggcatcgcgtttaagattttttccatctcaattgtcacttcgccgtcagcagcaaggcagactggatgtgatttaagccgttttgagattctgacgtttttcactttgtctgacagaatgtttttcatttcctcaaacagatccttatacttgctttcctcttcctcggactgcttttgatcctcatccgtgtctatgccaaggtctccgcttgatacggacttgaattctttttcctgataagaagccagcattttaattgcaaactcatcgatgtcctcagtaaagtagaggatttcatagcctttgtccgccaccatttccgtttgcggcagtttctcaatgcggtcgtaagaatcaccggtcgcgtaataaatgaatttctgctcctctggcattctggaaacatactcgtctaagctgaccagttttttctcttttgaagagtagaataataggagatccttcaattgatccttattcgcgccaaaatcattgtacacgccgaatttcagctgtctgccgaacgacttgtagaacgtctcgtatttctcgcggtcttttttcaacaggctttgcagctcgcttttgattttcttgctgatgtttttcgcgatcagcttcagctggcggtcatgctgcagcatttctctggaaatattcagcgatagatcctcagaatcgaccatgcccttcacaaagctgaagtggtccggtagcaggtctgcgcacttattcatgatcagcacgccattggaatacagctccaagcctttctcatattccttggaatagtagtcaaacggcatgttttcagggacgaatagaatcgcgttgtagcgaacggctccatccacactgatatgaacgtgtgtcagcggtttatcaaacccgtaatgcttttcagcatagaatttttcgtaatcctcatctgtcagctcgcttttgttttttctccagatcggcaccatgctgttgaccgtctgctcttcctgcacctcttcaaattcattttcgctgccttccttcggcttattaatggttgtatccattttgatcgggtagcgaatgaagtcggagtacttcttgatgatcgcttttaaacgatattcctctaaaaactcgtcatagctgtcatcttctgtgttctctttgattttcaggataatgtctgtaccgacagaatccttttcacacggctcaatcgtatagccgtctgcacccgcagactcccatttataagcctcttcgctgccaagcgctttactgatgactgtcacgacatcggcaaccataaatgccgcgtaaaaaccgacaccgaactgcccgataatgtcatgtccgtctttcagctcgttttcctttttaaacgcgagggaaccgctttttgcaattgttccaagatgctgttcaagctcatcctttgtcattccgatccccgtatcagagatggttaatgttctcgcatctttgtcagctgcgacctttatgtagtaactgtctttatcaaacgtaagcgcatcgtccgtaagcgctttgtaatagattttgtcaatcgcatcactcgaattggagattaactcgcgcaggaaaatttctttttgggtataaatggagttaatcatcatatccagcaagcgtttagactctgctttaaactcttttttcgccactcttgatcgctcctttaccattatgtaaacccttttcagcatctatttatcacataagatgacaattgtcaatcaggttgatagatgcatatatatgtaaatttaacattagttggatttgttttcactctttttctcactcattctcataaaaaagagaggcttcatcatcctctctttttttctgtgtcattccagcggccaaactcccgcttcatccatatatgcaccgggtagaaaaacaaaccgaacggtatcaaaaacaatagattatgccatgaagcattcagaaatgcgcttgcagtcactggaaacgtaatctcttgcaataaaaaagagatgacagtcagcacaacaaatgcagatggaatggtcacgatgcaataaaacttgagctccttcttatgctgtaccttcaaacttagaaacctcccaacaatttctaattcatcttaacatatgctggcctttcttttctcgcatgtttatcactgcacatagcgggaagacaaatagaaaaaggaggtctcgtatcatgggaagacttgaaaacaaaacagcagtgatcacaggcgccgcgacaggcattgggcaagcgacggcagaggtttttgccaatgaaggcgcgcgtgtgatcatcggagatatcaataaagatcaaatggaagaaacagttgacgcaatcagaaaaaacggaggacaggccgaatcctttcacctcgatgtgtcagatgaaaacagtgtgaaagcatttgctgatcaaatcaaggatgcatgcggaacgattgatattctgtttaataatgccggcgttgatcaggaaggcggaaaggtggacgaatatccggttgacctgtttgaccgcattatcgccgtcgacctgcgcggcacattcctttgcagcaaatatttgattccgctcatgctcgaaaatggaggctccatcatcaacacctcctccatgtcaggccgtgccgcggaccttgaccgctccggctacaacgcagcaaaaggcggcatcaccaacctgacaaaagcgatggcgatcgactacgcacggaacggcatccgcgtcaattccatttcaccgggtacgatcgaaaccccgctgattgacaaattagcaggcaccaaagaacaggaaatgggcgagaaattccgcgaagccaacaaatgggtcacgccgctcggccgcctcggccagccgaaggaaatggcgacagtggccctgttcctcgcgtcagacgacagctcatacgtcacaggagaggacatcaccgcagacggcggcatcatggcatacacatggccagggaaaatgctgattgatgagaaatggaagaaagaaacgaaataagagaggggatgtccctctctttttgtctttcaaagcaatacaaccttatactttttcacatccaaaaactgcaaaaattccctcgccagcacttcaggcggatgcgcctttccttcatccagccgatacaaaagcaacccgataatcattgcggatacataatgggcataaagctttttctctgcgtgaatatcagtttgctgatgcagataaaacgattccagcgctttgaacatatcaggtatcacatgaggaacaccccattcccgattgagaaaatggacaatgggcatatttgacaaagcagaaagcagactggcgagcgccttctccgcttcctttaaggaaaattcattcgggctggaggcaatcgtcaggtgatcaatgatctccgcacatgatcgctgtatcatggttcggagcaattcctccttattggcatagtgatcataaaaggttgcacggcggatattgcttttccgggtaatatccgaaattgtgatggctgcgtagtcttttttctccgccagcacgtccagaaatgccttctggagcgcctctctcgttcgaaccacacgcctgtcgatttgcttgtccttctctcgctctcctggcacagcttgtccaaacagccaataaaatctcttttgagaaacaagctcccataccttttggctgatagcttccggagtcgcggccgcatcctcattcagccaatacaggataatcgcgtacgtgtacaaggcccggtaatgtccgtaaatttcccgttcgatcggcgtcaaattcacatggaccggagtcagcagcacatcctgctgaaacacatccttaaaaaaacgatggaaatgccctctgttcatcatcacagaaaaaaaggatcgatgctcatgaacaaaggacagcgtcggatgcaccgtttgccgttttttgttcaaatggagggtatccatatgactgaaggcgccaaaaagcgctttgcccagcccttccttcttgtcttcgattaaatcctcaatgattgaaaacttatcctcataataaaggtagagcgatccgcggctcactttggccttttcagcgatttctttcattgtgatgtgttgaatatctctttcttccaataaagccagcagcgcctctttcacttgagcttcggcagattccggcacaaaagacacccccaatcattagacagatcttcgatatatgtacggtaacgtatagatggttcaccgttgtctttcttacagaaaaggtaccaccttataataggtccgagaaaagaagaaagcaaatgagggggattttacaatggaacagcaagtaaaggacgacatccagcgtgtctttcagcttcagaaaaaacagcaaaaagccttgcgcgcttcaacagcggaacagcggagagaaaagcttcaacgctttttagattccgtcatcgcccatgaagaagaaatcatcgaagcgatccgcaaagacgtccgcaaaccatatcacgaagtcaaaaaagcggaaatcgaaggaacaaaaaaagcgattagagataatatgaataacctggaacaatggatggcgcctaaagaagtcggttcatcgttaagccctgacgcaaacggaattcttatgtacgagcctaaaggcgtcacactcatcctcggcccgtggaactatccgtttatgctgacgatggcgccgcttgccgcttctctcgcagccggaaacagcgcgattgtgaagctgtccgatttcacgatgaacacgagcaacattgccgctaaagtgataagagacgcttttgatgaaaaagaagtcgcgatttttgaaggagaggttgaggtggcaaccgaactacttgatcagccgttcgaccatattttcttcactggaagcacaaatgtcgggaaaatcgtcatgacagcggctgccaaacacttggcatctgtcacacttgagcttggcggcaagagcccgacgattattgacagtgaatacgatctgatggacgcagcgaaaaagatcgccgtcgggaaattcgcaaacgccggccaaacctgcatcgcacctgattacctgttcattaaaaaagacgttcaggacaggttcgcggggattttacaaacagtcgtcaacgctggatttatggaggatgatcataccccagaccgcagcaaatttacgcagatcgtcaatgaccgcaacttcaaccgcgtcaaagatctgttcgacgatgccatcgaaaaaggggcggaagtggtgttcggcggcgtatttgatgccagcgaccgcacgatctcgccaaccgttttgaaaaacgtcacgcctgatatgaaaatcatgcaggaggaaatcttcgcaccgattctgccaatgatgaactatgaagacatcgacgaggtcatcgattacgtaaatgaccgcgataaaccgcttgcactttatgtgttcagcaaaaaccaagacctgattgacaacgtccttcagcacacgacatcaggaaatgcggccatcaatgatgtcgtcgtccatttcagtgacgtcaacctgccattcggcggcgtcaacacaagcggaatcggctcctatcatggggtatacggattcaaagagttttctcatgagaagggtgtatttattcaagcctctaaataatcataatgaagagaatctgcatcatcttgcaggttctttttttatctttatatcacctaaataaagagattaaaagtgataaaatacaattttcaaacgagacaaaattcctctagtctatctcattgaaaccctgcagcccctaacgtataatacccagaaaactttaaaggagtaaaatgatacatggaaaaaccagcaggattttggattcgggcagccgcctctattattgatgtatttattatagctatattctctttcattatgattttattaacaccttcattgtgttgccactcattgatgcagcaggtacacacatgtcagaagcccgatatgagtttttcatgttgatcattggcacaatccctgttttggccatcatatttattttcgctattctttactatagcttgctgacttcctcaaacatgcaagcaacattgggaaaaaaactcatgggcatcatcgttgtcaatcagtatagcgagcgtatttctttttggcacagcttcggccgtttcttcgcttacacattatttaagatcttatatatcggttttatcatggcggcctttccctctaaactggcattacataattatatttgcgggacaaaggttgtctataaaaataaatatcttgattgatcaaaaaaacaggctgccgagttaacctcgccagcctgttttactatttcccaaaagccatcagcttcgtataacttccaatataaagcgttccgtcctcagcgagctgaggagatgacactacgttgctgtcggtttgatatttccataattcattgccgtttgcgtctgccgcataaaccttcatatcatctgacccgaaataaaccgttcccttcgcgtcaatcagcggcgccgttctgacagggccgtctgtgtagaatgaccagttcatatccccgtttttgctgatggaaaacagctcgccgcttcctgagccgatgtagatattgccattatgatcaatcgcaggagatgagctggagaacccgtttagcgggaatgtccatttcaaactgcctgttgatgtataagcatacagctgtccatcttggttgccggcataaatgtttccgtccttatcaatcaccggatatcctttaaacgcatttgacgtcgttctggaccatttcacctgtccggttccggagttgatcgcataaaacacgtaattatatgtgccgacatacacggtgccgtttttggcaagcaccggcacagagctgacgacaccatttgttttcaacttccagcgctctgtccaggttgattttgacgtcggtttgatcgcgtgaacataattatcaagtgttgagaaatacaacgtcccgtctgaaccgatcaccgtttcagagcttggcccgccgcttaacggaaccgttgttaaaatttctcccgtttctttgtcaataaaataaatctttttgtcataggatgccaaatagataacgccgttggtcccaagtacaggagattgcgtatatgtttttccaagattgcccgtcacccatttgactgagccgtctggattaaaggctttcatttccccgtctctggaatgaagatatactgtgccgtctccgtcaatcacagcccccgctccattttgcggagtcgttctgatgtcgttttgccatttcagcgtcccatctgtatttccggcgaaccggctttcgcgtgaccagttaaacatggcaggcgccatcgcttgtacatcatatcttcctggcaaaaagccagatgctccattattttgagaaaacaccgtttccgccgcataagcagctgtcggctgaagcactttggcagcgggcacatcagaaacagcgccggccgaaacagccgccgccaccgcagctcccgcaatcaaagctttcatacgaaatgacttgaccatcattgagacccccattatatgtaacttctaatttgtgaccatcataacatattcatccattttataaatctatttcacaaaaacatcacaaactagaaaactatgtaagagtattcacggacgttttttcagcacccggccgaaatgcagccacaaaccaaatgacgttgacagcagccgcagcgagactaattccgaaaacaaagatcacctcagaaagcagatggtcactaaagaaactaaacatcaagataaaaccggccgaagacaaatgaatcaaaagcccgaagccgcaaagcaccgccatgacatacctcattgcatcgactccgagcatataaacgagaaatggaatgaaatacaatacaaggatcataccgacagctgaccacatgccagctgaattaaactgattggccgccgctcccgttccggccagcggcgtaagtgaagccgccactatcacggcgcaaaaaagaaacgcagaaatggttgtcatgatcgccacgctattttttttagacatcaaactcctcctttaatagaaatattaacctttttcattataagtaagttgaatgttatattcattatattttttaaaaaaatccagatcgtacaaaaatgatatgattctttctagtatatttatatagtaaaaaacaaaggataaaagactcatttttctgtaatatcaggattttatcaccataccatattgcatgtacttgtttttcaaagtatactattccagattaattcagaggagagagaaaaatacatggaaaaaccagcaggattttggattcgttttttagcttattttattgatggcattattgtatctgttcctagttatattattctatttgtgatcaattctgtttttgtagctggggctgtggcaacaaacccttacatgacggaagaagagtatttagtgaaatacatgacgcttgcatttttgcctactatgctgatcatgatcgtcatcagtgtgttatattacgggctgctcacagcttctaaaatgcaaggcacacttggcaaaaaaattcttggcctgaaagtggtcaatgaacaaggtgaacgggtttctgtcggacagggaattggccgttactttgcctatatcttatctggaatcatcttttatatcgggtttatcatgatcgcctttggagagaaaaaaggcctgcatgacatcatttgcaaaacacgtgtcgtgtataaataatagaaaaaagtctagacgccaataggcatctagacttttgttttctttacaataggctgccacgacagatacgtagcgcttctccacagccactcaaacggccccatccgaaagacacgaagccaaaggtggctgaagaccatttgaacggcacaaaccgtaattgtaatgagcacaccggcagcagggtacacttttccatacaggcccaagccgtaatgataaaaaatccaagtacacacaatagactgcatcaaataattggtaaatgccatcctcccaacagcggagaatgattgcagcactgttctcactcttgttttatgataaagatagacaaccgttgtaacatagaaaaacatgaggaaaggcgcgccaatcagcagaaatagttccttttccgttacactgtacagcacatgggcgccgatgccgatgacaagcccagccatccataatcgttttaatcctttgcgatgcttttccggttcatgcaaataccgtgattttgctgccgcagctcccagcaaaaacatgctgaaataaggaatggatgcaaagaagaagttgagcggattatacgtaagcatgccattcgaagacatataaacaagacggtcatggatccgctgttctgcaatgtccttcaggctgccgcttccataaacatgaatcgcttgtgttgcctgctgtgttaccgcttgtacccattcctgtccgtttgattgatcaaaacttgtcaacatgaacggaatggaaaacagaagatacaaagagaccgcccatatcagcagtgttttcggctttgcttttcgaaacaagagcaggacaaaaccgagcaaggcatattctgttaaaatatccccgtcccatatcaaaaaggcatgaatcgttccaaacaagagaagcgccattaaccttctcacatataacggaacaaaccgtttccctttgttttctgctctctccatcatgacaaccatgccaaatccaaataaaaaggaaaacaataaaatacattttgtttgaatgaagaatttcagtatgtctgcggcggcaaaatcagcttcagaccacttatccatgaaaaaattctcttttccaagcatagacaaatacatatccggataactgaaatgtgccagattgacaaataagatgccgaaaatcgccattcctctcagcacatcaagcacaccgatccgctcatttgttaaagtcggctgtaatgaagacatagccatcacgctccttttttctgtaccttaagggtatgaaaaaatgaagcgcggaaacatcgatttaggtgtcaggccggcatgaaaaccttacaatcttgtcatctttatggtttcatcacctttaaatctaatgcttcgatattctgcaaaacgcgatcaaaacgcaaagcctgaggctcacatgggaagatgtggccttcatacgggtcgcctaacgtccggaaaaacggttcaaataaaccaggaaccaatacgcccaccatctttgtatagtaagaatcaaggcgataggagtgaacggtatttgcagggacatgcaggaaatctcccggattcagctgaatttcctggccatctgcccacatcgtcatctggccttcaaggcaataaaatgtttctgtatgatgttcatggtagtgatcaacgattcggtcacctttagggccttcagaggatacgacgataaactggccatctgtatttttttgtgcagccacaatgcggtgaagctgatctccagtcaacaggcgatctccttctccagattcaagaacgtatggaaccgctccatctggcagctctgtaagttccgctaatttggccgaacatgcaggcttttcttcatctagaaatacaatgtccgctacagcggctgcttctgcaaatcgctcgtttgagacttcttcgcttgcgtacggcggatgttcagcgtgatcatacggattcccaataacggaatacaagtgcgctacgtttcctttcatcgtgtaagataccagtcttgttctgtggctctgcatccggtagctgtgcggtgttcccgccggaatgttggcataatcacctgatattaataaatagcgttcaccatcaagtgtcagttccagtttcccgtccaaaacgagaattccttcatgtgtgtccttgtggacgtgaagcggaaaggcatctccttttcccccggaaagaagcacgatctcaaacaaatcacctgtgctcctcccattcgcaatcaccgtggcaacctgtctgccgaacagatagcgctcgccttctccgctccggagcaaataaggcattttttctttgggcaatgaatgtgtacataatgttttcatattatcgcttcctccaatttagaccagtctatatactataactttctgactagaccgttctatataattgtaggagaaaggataacaaaatgctaccctttttttctcaccagcactggtatttgttcggcaatgagaagaagaggcgttttgtctttattcgttaacgaaagcatgatgccgccctcaatcatcgaattaatcagcgttccaagctgatttgcttcttcttctgcaaatccgttttccattaattttctggcaaaaaccgcttcccagcttttaaacaccttcatgcaaaccgtccgtagcggttcactgattaacgctgtctcactcgccagcaaaccgactggaatacctttaatgctttctgtgttgtcaaattggctggctgtttttttgataaaaagctgaatcgcttcaataggatcagaggattcatccatgctttgctgtatcagatgttcaacgatcttacctgtatatgtaaccgcttcaattgctaattcttctttgccattcggaaaaaagtgataaagcgatcccttaggagcaccgctttcttttacaatctggttcaaacctgtcgcgtgatatccttgcagctggaacagacgtgacgccgtgtgaaggattttttcacgtgaatctcctctgctagtcattaaaacattccctcctaggtatggtagagcgacttatataatataaaaaagaaccctgtgattgtcaaaaggggtaagacccttccggatggggtaatgtacaaaaacagcgtctaggagggatctctcaatgacaatcgatcattcagtcacgaatacagagcagcttgaacaacagaaccccggcatgaaaacgaagatcaaactgaaaaaactcaaggatcaggtgatcgtcattaccggcgcttcaagcggtatcggacttgtcacggcgagaatggcagctgaaaaaggcgcaaaggtcgtggcagcagcgcgaaatgaagacgcgctgaaggagctcactgatgaacttaaggaaaaagggcacgacgccatatgggtaaaggcggatgtcggaaaagaagcggacgtcaaccgcatcgcagaaaccgcgatcagcacattcggccgctttgacacatgggtcaacaatgcggccgtctcgactttcggacatgccatggacgtcaccgttgaagacatgaagcgcatgttcgacacaaatttctggggacctgtttacggaacaagagcggctgtcaaacactacactggcagaggtgtgccgggcgcactcattaatgtaggaagcctgttcggagacaggggaacagtcattcaatccacatatgcgtctgccaaatttgcgcttcacggctggacggaaagcatccgaatggagcttgaaaaggaacaggcgcccgtctcggtaacgctcatccacccgggcagaattgacacgccttataacgagcatgcgcacagctacctcgacaaacagccggctcattaccgctccatgatctatccgccggaagcagtcgccgaagctatcctgtttgccgccgaaaaccctaagcgcgacatgtacatcggctcacaggccaaagccatcgccatgctgggcgcgcttttccctcgtctgaccgacagactgatggaaaaaatcatgtatcacagccagcatgccgaaagaccgtccaaaccgcgagaagaaagcgctctttatgatgcgggctgcggtatgcatgacagaggcacaaataaaggatggatgaggtcaagaagctactacacaaaagcgacgaagcgccccattgtatcggcggctgttgttgccggactagtggcttgggctgccgccaaacgatgcagataatctctgaccatgatagaaaaacccatgctgttccagcgaaccatgggtttttcagctgttaatcgataaaagccttgttcatacgctgcagcagctcgccaaacatctctttttcctgtgttgaccattctttcagcatctgttcataacgttcaaggcgcttttgctgatcggcttttaatagttgtttgccgagttttgtaatggtaaacaggctgactctcccatcagatgggtctgagaaacgatagatgagctcctttgcctctaatgcagctgcttgtcttgaaagagtagaaatatcaagcttaaacgattctgccaattccttaacacgagcaggcccaaactcatccaattgtctcagtaataagtacgaagatctctccaaattccctgttcttttctccgattgatccagataaacagctctcctgataaaagtcgtcagctcatattcaattaattcaactggattttgattttgcaatcgctctcgctccctattccaatctccggcattgacaacatcatatatacttgtataatacaaatgtacattaactgaataaatacaagtcgttatatgactaaatcaattattatacttgtatagtacaatcatataaaaagaaagtaaagcgattcctcagaaccatcctagaagcaagcaccagaaaggaggaagctgttctgattggagagcagcacttgatgtgaaagtcatacgaattattttgcaagtgttgatattatatgtattttttatgatcggggaagccattcagcatctgtttcatttacccgtgtcaggaagcatcgttggattggtattgcttctgatctgcttgggcctccgtattgttcccgtctccatcattgaagacggagcagggtttttattatccttccttccattgttgttcatcccggcaatgacaggagtgataaactatccgtctctcatttcattcaatggcctgatgctgctgattacagtcgttctgagcaccatcgtcacgatcattgcggctggattcgccagccagctattagagaaaaaagcaaaaaaacgggaggagaaagagaaatgcagcaagcatgtatcgcgatcattataattcttttaacagttgccgcttatttagcgatggtcaaactctataagcgattcccgcttccatttcttatccctgttctgacaacgaccattttgattgtagcggctttgatgatgtttcatgtttcctatgaaggctatatgatcggggggaaatggatcaattctttgcttgggccggctgtcgtggcactggcctatccgctttataaacaatggcatatcattgtcaaacattgtgttcccattttaggcggcgtcctggtcggattatgcatgggaatgatcagcgggctgatcttcgcagaagcattcgggattgatcatgatctcttattatccattctgccaaagtcgatcacaacccctgtcgctattcagatcgccgccggtcttggcggcgtcccttccatgacagtcgtatttgtcatgattgcgggcttttcaggcgtcatcctcgggccgcttttcctaaaatggcttcgcatacgcagttccctaggacaaggcattgcattaggcagcgcctcccatgcactaggcacctccaaagcattggaatatggagaactggccgtctccatgagttccgtctccatgacgctttgtgcggtgctcggctcattcttcggcccgctcgtcgtctggctgtttcatatttaacaaagaaagactgccccgggggagggcagtctttttcgtttaagaagcaaaaaaatcaatcagcggctgaaagtccttagataaatcaacgtcattcggttctgcttgaagcaggcggtcaatcatacgctccagctcctcaacatcattcttatccgtatattcaatgaagtttaagctttcaagccaatcccgatatgaatgtttggctttgccatagctgtttccaaagacaaggcaaggtgttttggtgataatcgagaaaatcatcgcgtgaaggcggtcggtaatcaccaatttactggagccgatgcggtccagcatctccataaaatgcttttcacgatcagcgtaatcgatggtgtctaccgtatccagcaccgtatcggtacgctctgtgtaagttgttttttctgcccattgcttcatctgtgaaataaaatcttcgtcagtcactttctccttatccgctcttaaaataaagagaacgccgtcccgctcgagctctcgcggcacaatatccaaggaaagcaccatgtccggtgtaaagatcacattggagttgaaggtctctttcacaacatccagtgtttgcgtctcacgcgcagcaatcgttaagtttgtattttgatggtacgcatcctgtgtttttttcttttccttctgtccttcctctgtatcctcaaaataaacggattgtggcagagaaattgatttgtagtctttaaacgccgaaaagacctttcttctgtcttcctcaatatcgagataaaggtttcctaagttccctccgcctgtaaagcagacaatatcgtcttcacgaatgatctccttcaccagttcaatgccctcatccgtcgcataatccataatctcaatgtattcataatacggaaaatgatttttgataaatttctcttccgcatacgcaatcgcttggtctccaatgtttgtgtaactaggggaaccaaacaaaaatacttttcgtttatcatttaacagagcttccggctccacatttggcgcaatgccttttactagttttttgcctttgattttttgtacagtcatatctgcgtcctccttctgggatgaattcctcattgtgtgttaactgtctctacccaaaaagaaggatggctatgcattggcatgtgcatcggctatatcagaaacatcgttttcgccaatttgatagacgctgcaatgtcccgcgccgttctttccatatattccgcggcatgttcaaacgcatcttctagcggcacggctccggggacgatgctgaaaagcgcatcgattccgtgttgatagacggcatcactgtcacgtgatactgatcccgcaataccgatgacaggcacatcatatgatttagccgccttggctacgccgatcggcgtttttccatgaaccgtttggctgtcgatccgtccctcgccggtaatcacaagatctgcatcctgaacgatactttcaaaatcaaccgcttcaaggacaatatcaatgcctcttttcaggtcagcctgaagataagtcagcaggctccatccaagaccgcccgctgcaccggcgccctctgtatctcggaaggttgatccgagctctttttctgtcatatcagcgaaatggcttacgttctggtctagtacatccagcatgtcggccgtcgcgcctttttgcggcccgaaaacagccgtagcgccctttggtcctgttaacggattgtccacgtcacaggcaacttccagtttgacattccgcaatctggaatcaagcccgccaacatctattgatgcaagctgagataacgcgccgcccccgggccaatctcgcggcctgagttatcaagaagccttccgcccaatgcctgaatcatcccggctcccccgtcgttcgtggcgcttccgccgattccgatgatcaatcgctccgctcccgcatcaagagctgctccgattaattctcccgttccccttgttgtagtgatgagcggatttcgcttatctacaggcaccagatgcagccctgaagcagcagccatttcaatcacagctgttctcccatctcccatcatgccaaagaaagctctcaccggttcccccagcggccctgtgacaacttgctctatgatccttccattggtcgcatcgaccagagattgaacggttccctcgccgccatccgccaccggcaattttctgtaatcagcacccggaaagaccgatttgaaacctctttctatcgcttcggctgcctccagagctgataagctttccttaaaagaatcaggtgcaatgatgattttcatccaaatcgcctctttcaaaacatgattcacttacgctagttatctccaatgtaccatattccatttagaaataaataccataatgattgggaaaaattttattaaaaattagaaatgaaagtgtttgcataaaagaaatattcacgttatcatacttgtatacaagtatacttcttgagtgaggaaggtgagtgtatgctagactccaaagacctgttgtatcccgcaaaatggctctcaaaagcgtcaaccggagttcgtgtcgcatacgagctgagaatgcggatcgtttcaggtctgattgaaagcggtaccattttatcagaaaatacaatcgccgccgagttttcagtaagccgttcgccggttcgcgaagcgctaaaaatactcgcatccgaaaaaatcatccgcttagaacgaatgggagcggtcgtaattggtttaactgagaagaaaatcgcggaaatttatgatgtgcggttactattagaaacatttgtctttgaacggcttgtcaaaatagacattgagcctttagttaaggatctcagcaaaattcttgaaatgatgaaagtctcaatcaaatatgaggacgctgacgaattttcatttcaagatgtgctgttccatgaaacgattatccgagcgattgatcattcatacattcagatgatctggaacaatctaaaacccgtcatggaaagctttattcttttatcgatgcgggtacggttaaaggaaaagtatgaagacttcacaaggatcttagataaccacgagctttatattcaagccatcaaaacaaaggatagggtgctgatgattcagtctcttcaccaaaactttgatgatgtgcaggataaggtagaagacctatggctctcacaacaaatgctggcaaaaggagctgaatacaacaatgactagttatatgttaggaatcgatatcggcacgacaagcacaaaagctgtgctgttcagtgaaaacggagatgtggtacagaaagaaagcatcggctacccgctctatacaccggacatctcaacagcagaacaaaatccggaagagatttttcaggcagtcatccatacaacagcgagaattacaaaacagcatcccgaaaaacaaatctctttcatttcgttcagcagcgccatgcacagcgtcattgcaatcgacgaaaatgacaagccgctgacgccatgcatcacatgggccgacaacagaagtgaaggctgggcgcataagatcaaagaggaattgaacggacatgaggtgtacaaacggacgggaacaccgattcatccgatggcaccgttaagtaaaattgcctggatcacgaatgaaagaaaagaaatcgcttccaaggcaaaaaaatatatcggcatcaaagaatacatttttaaacagctgttcaatgagtatgtcatcgattactcattggcatcagcgacaggcatgatgaacctgaaaagcttggcttgggacgaagaggcactgcgcatcgcaggcatcacgccggatcacttatccaaactcgtgccgacaaccgagatctttcagcactgcagcccggaaatagcgatccaaatgggaatcgatccggaaacgccttttgtcatcggggccagcgacggcgtgctgtccaacctcggcgtcaacgccattaaaaagggagaaatcgccgtcaccatcggtacaagcggtgccatccggacgattattgacaagccgcaaaccgatgaaaaagggagaattttttgctatgccttgacggacaagcattgggttattggggggcctgtgaacaatgggggcatcgtccttcgctggatcagagacgagtttgcctcctccgaaatcgaaacagcgacacggctgggcattgatccatatgacgtgctgacgaaaattgcccaacgcgtcagacccggttctgacggtctgctgttccacccatatctcgccggagaacgcgctccgttgtggaatccggatgtacggggctcatttttcggcctgaccatgtcgcataagaaagagcatatgatacgcgcggcattggaaggcgtcatttacaacctgtacacggtgttcttggcgttaactgaatgcatggatggcccggtaacccgcatccaagcgacagggggatttgcaaggtcggaggtttggcgccaaatgatgtctgatatcttcgaatcagaggttgtcgttccggaaagctacgaaagctcatgtctcggcgcctgcattttaggcctgtatgcaacaggaaaaattgactctttcgacgccgtgtccgacatgatcggcagcacatacagacatacgccgatcgaagactcagccaaggaatacagaacattaatgccgattttcatcaatctatcaagattattagaaaatcaatatacacaaattgcagattatcagaggggcttaatcacacacaaatagtacatgacatgaaggggagggcattaccatgccgttaatcatcgttgcacttgggatcttagcattactatttctgattatgggcttaaaattaaacacatttatttccctgctggtcgtatcgttcggcgtggcactggcactcgggatgccgttcgataaggttgtcagctccatcgaagcagggataggggggactcttggccacatcgcgctcatcttcggactcggtgcgatgctgggcaagctgatcgcggattcaggaggcgcacagcgcattgcgatgacgctcgtcaacaaattcggcgagaaaaatattcaatgggccgttgtcattgcctcatttattattgggattgcgttattttttgaagtaggactggttctattaattccgattgtctttgcgatttcaagagaattgaagatttctattttatatctcggaatcccgatggtcgcggcactatccgtcacacacggtttcctgccgccacacccgggacctacggcgatcgccggtgagtatggcgcaaacattggagaagtgctgctgtatggctttatcgttgctgttccgacagtgctcatcgcagggccgttatttacaaagtttgcgaaaaaaatcgttcctgcatcatttgcgaaaaacggcaatattgcatcactcggcacacaaaaaacgtttaaccttgaagaaacacccggctttggaatcagtgtctttactgcaatgctcccgattatcatcatgtcggtcgcgaccattatcgacctgcttcaagaaacaatcgggtttgcagataacggaattttagcttttatcagattgattggaaacgcatcgactgctatgattatttcgttattggtcgcagtctatacaatgggcatcaagcgcaacattccagtcaaaaccgtgatggattcttgttcaactgccatttcacaaatcggcatgatgctattgatcatcggaggaggcggcgccttcaaacaagtgctgatcaacggcggtgtcggcgattacgtagcagacttattcaaagaaacggcattatcgccaatcattctggcatggctcatcgcggcgatcctgcgcatttctctaggctcagcgactgttgccgcactaagcacaacaggtctggtcattccgttattgggccattctgatgttaacctggcgttagtcgtactcgcaacaggcgccggaagtgtcatcgcttcacacgtcaatgacgccggcttctggatgttcaaggaatacttcggattaagcatgaaagaaacattcgccacatggacattgctggaaaccattatttccgttgctggactgggattcattttattgttaagtttagttgtatgaaattaagaaggagctgtaacacatgttcaattcgattggtgtcataggcttaggcgtaatgggaagcaacatcgccttaaacatggcaaataaaggtgaaaacgtcgctgtctataattacaccagagatttaacggaccagcttatccaaaagctggatggacaatctctcagcccgtattacgagcttgaggactttgttcaatcgttagaaaaaccaagaaaaatctttttgatggtcacagcgggaaaacccgtagattccgtcatccaatcattaaagcctttgcttgaagaaggcgacgtcatcatggacggaggaaactcccactatgaagacacagaaagaagatatgacgagctgaaggaaaaagggattggctacctgggagtcggcatttccggcggtgaagtcggcgcattaacagggccttccatcatgccgggcggagatcgcgacgtctatgagaaagccgctcctatcctgacgaaaatcgcagctcaagtcggagatgacccttgctgtgtctatatcggaccaaaaggggcagggcactttacaaaaatggtgcacaacggcattgaatatgcagacatgcagctgattgcagaagcgtatacgtttctaagagaaacgcttcatctgccgctagatgaaattgcatctatatttgaaacatggaatcaaggtgagctgaaaagctatttaatagagattacagctgagattttacgcaaaaaagacgaaaaaacagggcagcctctgatcgatgtcattcttgataaaaccggacaaaaaggcactgggaaatggacgagcatgcaggcgattgataacggcatcccgtccacgatcatcacagagtccttgttcgcccgctacttgtcatccttaaaagaagaacggatggcagctcaagacgtattagcaggcccggaagccgaagaaaaacacttggataaagacacctggattgaatacgtcagacaggctctttacatggggaaagtatgcgcctatgcacaaggctttgcccaatataagatgtcatctgagctttacggctggaatctgccgctcaaagacattgccttgattttccgaggcggctgcattatccgcgctgatttccttaacgtgatcagcgaagcattcagtgagcagccaaatctggcaaacctgctgatcgcgccttatttcacagataagctccatgcctatcaaacaggcctgcgaaaagtcgtttgcgagggaatcagcactggaatctccttcccatgcttaactaccgcgctctcttattacgacggctaccgcacagggcgttccaatgcgaacctcttgcaggcgcagcgcgattactttggcgctcatacgtacgaacggactgatatggacggcgtcttccatacgaattggtctgaataacctgtcatcaaaaacacggtcagttttcaactgaaccgtgtttttttcttctatcccaaacaacagaagacataagttatgttttaaatatcataaacagtgatacaataatagctagaaacaatccccaagatcatcatgtgacagcagcttgctgttccgttctattctgcttttggccattgtcctttgcccttgcccatggtgtcataaaatgttcaaatgccaaaacggcctgtcattctgatttacaaaagtccctgaaaaccttgtctaattgagaatcagcctctcatttgttataaaagaaatgcataaatcctacctgtcacaccttaaataagttgaaaaaaagtaggttatcgcttgacaaaaaatatatattaattaataattcatatataattagaattattattgaaagcgaatatgctttctaatacatttttaggaggaatatacattatgtctttaatcggtaaagaagtacttccattcgaagcaaaagcattcaaaaacggtgaattcatcgatgtaacaaacgaagatttgaaaggccaatggagcgtattctgcttctacccagcagatttctctttcgtatgcccaactgagcttgaagatcttcaagaacaatatgctgctcttaaagaattaggtgttgaagtatactctgtttctacagatactcacttcgtacacaaaggctggcatgacagctctgaaaaaatcagcaaaatcacttacgcaatgatcggtgacccatctcaaacgatctctcgcaacttcgatgttcttgacgaagaaactggccttgctgaccgcggaacattcatcatcgatccagacggcgttatccaaactgttgaaatcaatgcaggcggtatcggccgtgacgcaagcaaccttgtaaacaaagtaaaagcagctcaatacgttcgtcaaaacccaggtgaagtttgcccggctaaatgggaagaaggcggcgaaactcttacacctagccttgatctagtaggtaaaatctaaggagtgcattcaattggtacttgatgcaaacatcaaagcacaattaaatcaatatatgcagctaattgagaatgacattgttctcaaagttagcgcaggcgaagatgacacttctaaggacatgctggctctcgttgatgagctggcttccatgtcatcgaaaatttcagttgaaaaagctgaattaaacagaacgccaagcttcagtgtcaatcgtgtcggagaagacactggcgtgactttcgccggtatccctctgggccacgaattcacatcattagtgttggcgctgctccaagtgagcggcagaccgcctaaggtggaccaaaaagtcattgatcaggtgaagaagatcagcggtgaataccacttcgaatcttatatcagcctgacatgccacaactgtcctgatgttgtacaagctttaaacatgatgagcgtgctgaacccgaacattacgcacacgatgattgacggtgcagcatacaaagcagaagttgaaagcaaaaacatcatggcagtgccgaccgtttacctgaatggcgaatccttcggaagcggccgtatgacgcttgaagaaatccttgcgaaaatgggcagcggcgcagatgcatctgagtttgctgacaaagagccgtttgacgttcttgttgtcggaggcggacctgctggtgcaagtgcagcgatctacactgcacgtaaaggcatccgcactggggttgtcgctgaacgcttcggcggacaggttctcgacaccatgagcatcgaaaacttcatcagcgtcaaagcgacggaaggaccgaagcttgcggcaagtcttgaagagcatgtgaaggaatatgatattgatgtcatgaaccttcagcgtgcgaaacgccttgagaagaaagatctgttcgaacttgaactcgaaaacggcgctgttctgaaaagtaaaacagtgatcctttcaacaggtgcacgctggcgcaatgtcaacgtacccggtgaacaagagttcaaaaacaaaggtgtcgcatactgcccgcactgtgatgggccattgtttgaaggcaaagacgttgcggtaatcggcggcggaaactctggtatcgaagcagcgattgatctagcaggtattgtgaatcatgttactgtgctagagttcgcgccggaactgaaagcagacgaagtcctgcaaaaacgtctctacagcctgcctaacgttactgtcgtgaaaaacgcacaaacaaaagaaatcacaggtgatcagagcgttaacggcatcacatatgtagaccgcgaaacaggcgaagaaaaacacgttgaacttcaaggtgtattcgtccaaatcggtctcgtgccaaacacagaatggttagaaggaacggttgaacgcaaccgcatgggcgaaatcattgtcgacaaacacggcgcaacaagcgtaccaggcttatttgctgccggcgactgcacagacagtgcgtacaaccaaattattatttctatgggatcaggtgcaactgccgccctcggcgcgtttgattacctaatccgtaactgataaaaaaatccgctatattgccagattggcaggatagcggatttttctttttctacagaaaaaacccgaaccaggcactccggtaaaagtgctcgattcgggccagcttcttataggtcctcgccattcgtttgaatgacatttttgtaccactcaaaggaatctttcttataccgcttcatggatccgtttccttcattgtcacgatcaacatagatcatgccgtagcgttttttcatttcgccagttgtgaaggagacaatatcaataatgccccacggcgtgtagccaattaaatcaacaccatcgtacgtgaccgctttttctaatgcttcaatatgcgattttaaatattgaatgcgttccggatcatgaaccttgccgtcctcctccagcgtatccactgcgccaaagccattttcaacgatgaataacgggatttggtaccgatcataaaaacgatttaacgtatatctcagcccggttggatcaatcgcccatccccagtcactcgaagtgatatacggattttcgacaccattcggcaagccgccattgacaatatcgccagtgttatcatttttcacatcgcttttcacagttgttgacatgtaatagctgaagcctaagtaatcgacggttccgtttcttaaaatctcatcatcgccgtcttcgaatgtgatgttgtagccttcgcgttcaaattccttcaacgcgtagcttggataataaccgcgaacctgtacatcagggaagaaatagcgctgcctcatttcttcttcagccagcatcacatcttcaggattggaggagaaaggataaatcggcacgtgtgataccatagccccgatctggaactctggattgatgtcttttccttttgccactgctaaggcgctcgccactagttcgtggtgtgccgtttgatacatgacctccttggcgttttcgttttcgccaaccacaacacctgaattcgtccataggaacaacggattgttcacatccatttggttgttgatctcgttaaatgtcatccagtactttactttatctttgtaacgggtaaagcaagcctctgcaaagttgacgaagaagtccacgactttccggtttctaaagccgccatattctcttgccaggtgcagcggcatttcaaagtgagacagggtaatgaccggctcgatcccatgcttcagcaattcatcaaacacatcatcataaaactgcaaaccagcttcgttcggttcagcctcatcgcctttcggaaaaatccggctccagccgatggacgtccgcagacattttaatcccatttccgcaaacaaagcgatatcttccttgtatctgtgatagaaatcaatggcttcatggttcggataaaactcgttctcttcaatcgtatccgtgatttttctcggcacgccatgtgcacctgctgtcatcacatcgacgacactcggccctttacctccttgattccatccgccttcaaattggtgggcagctaaagcaccgccccataaaaaatcctttggcatgtttcccatgtttaattcctcctcagcttacgactgtaaatattttttgatgcaatgcactttcctcaatctcttcaatgaaagctttaacaaactcatcgccttttttgacggtatcgccttcttttaccttcaaggaaaaaggcgtgccgtcaaatgtcaccgtatccagcccgatgtgcgcaagcaattcgacgccggacgctgaacgcagctttgtaggcgccaccatgacaaccgtaataacgccgggatggtggcatcgattttacgatatccttcgctttaggggtagaccgcttcagcaccaatcgaagtctggtagcgcagcgagaagccccaatcacattctcttccccgcctacggcctctaaaatgtcttttgctagtctcgtataatctctcacttccccgacatttcacccacccctttgatttggttgcgctttcattataattgtaccggtataatatatcaataccgaaacaaaatatttacgcactaactatcattgtaagcggtttatgctataattttggcagtgaaactaaacgaataaatgaggaatgcgtatgttaaaataccagcaaatcgcagcggaaattgaaacatatatagaagaacaccagcttcagcggggagacaaactgccagtcctagaaaccctcatggcccagtttgaagtcagcaaaagcacaatcacaaagtccctcgagctattagagcaaaaaggcgcgatctttcaggtcagaggaagcggcattttcgtcagaaaacataaacgaaaaggctatatcagccttctgtcgaatcagggatttaaaaaagacctcgaggatttcaacgtcacctcaaaagttatcgaactagacgtgagaaagccaactccggaagcggcggaaaacctgaacatcggaatggacgaggacatctactatgtcaaaagggtccgttacatcaatggccagaccctttgctacgaagagtcttactacaacaaatcgatcgtgacgtatttaaacaacgaaatcgtctcccactccatcttccattacatccgggaaggactggggttgaagattggtttttctgatttgtttctgcacgtgggccagcttaatgaggaagaagcggaatacttgggattagaggctggactgccgaagctgtatatagaaagtatttttcacctgacaaatgggcagccgtttgattactcgaagatttcgtataattataagcagtcgcagtttgtcgtacaggctaatagttttttgctgtagagctgcttcactatggaaggtggtcgacatgaacaaaatcatcattcctgcaatactagccatctttgcgctctggatattcttacagatttcactagagatgagcatcgttaagaatccaatgaactactttatcgtattcattatctttttcctctttgtaaagatggtgaaagaaaaacaataatagtttactttgaacaggaaaccagatttgacatctggtttttttgtgtttcactttattcatccgtttcaattgtctctaaaagcagttatgcggtactatcatataaaggtccaatgtttaaaaataatgtcatacttttaaattcaccttatcatgcacatgatcatatataggggtttattctaaaaaggggatggacgattttggaaagcaagtacctagatctactcgcgcaaaaatacgattgtgaagaaaaagtggtaacagaaatcattaatttgaaagcgatattgaacctgccaaagggcactgagcattttgtcagtgatttgcacggggagtatcaggcattccagcacgtgctgcgcaatggttcaggacgagtcaaagagaagatacgcgacatcttcagcggtgtcatttacgatagagaaatcgatgaattagcagcattggtctactatccggaagacaaactgaagttaatcaaacatgactttgatgcgaaagaagcgttaaacgagtggtataaagaaacgattcatcgaatgattaagctcgtttcatattgctcctccaagtatacccgctccaaattgcgcaaagcactgcctgcccagtttgcttatattacggaggagctgttatacaaaacagaacaagctggcaacaaggagcaatattactctgaaatcattgatcagatcattgagcttggccaagccgataagctgatcaccggtcttgcttacagcgttcagcgattggtggtcgaccatctgcatgtggtcggcgatatttacgaccgcggaccgcagccggatagaattatggaagaactgatcaactatcattctgtcgatattcagtggggaaatcacgatgtcctttggatcggcgcctattccggttccaaagtgtgcctggccaatattatccgcatctgtgcccgctacgacaacctggatattattgaggacgtgtacggcatcaacctgagaccgctgctgaatctggccgaaaaatattatgacgataatccagcgttccgtccaaaagcagacgaaaacaggccagaggatgagattaagcaaatcacaaaaatccatcaagcgattgcgatgatccaattcaagcttgagagtccgattatcaagagacggccgaactttaatatggaagagcggctgttattagagaaaatagattatgacaaaaacgaaatcacgctaaacggaaaaacatatcagctggaaaacacctgctttgcgacaatcaatccggagcagccagatcagctactagaagaagaagcagaagtcatagacaagctgctattctctgtccagcattccgaaaagctgggccgacatatgaattttatgatgaaaaaaggcagcctttatttaaaatataacggcaacctgttaattcatggctgtattccagttgatgaaaacggcaatatggaaacgatgatgattgaggataaagcctatgcgggtcgtgagctgctcgatgtatttgaacggttcttacgagaagcgtttgcccacccggaagaaaccgatgacctggcgacagatatggcctggtatttatggacaggcgagtactcctccctcttcggaaaacgcgccatgacgacatttgagcggtatttcatcaaagagaaggaaacgcataaagaaaagaaaaacccgtattattatttacgtgaagacgaggcaacctgccgaaacatcctggcagaattcggcctcaatccagatcatggccatatcatcaacggccatacacctgtaaaagaaatcgaaggagaagacccaatcaaagcaaacggaaaaatgatcgtcatcgacggcggcttctccaaagcctaccaatccacaacaggcatcgccggctacacactgctatacaactcctacggcatgcagctcgtcgcccataaacacttcaactccaaggcagaagtcctaagcaccggaaccgacgtcttaacggtcaaacgattagtggacaaagagctcgagcggaagaaagtgaaggaaacgaatgtgggtgaggaactgttgcaggaagttgcgattttggagagtttgcgggagtatcggtatatgaagtgagggatgtggggttcagggattatattctttgggcccatttttacaatcaactataaatcaacaaaaagcctctcaaaatagggttttgagaggctcactatcaaacatgaaaagtacttctattagtgttaggtcttatgacttgatctacattctcagcaatcgatttataattttgtttttttgataaacgatcataatccccaacaatataaaactctttttttgcccttgtaactgcaacattaattaaattaggctttgagcacgaccaatttgccgctccatcactattttgatctgtccccactacaaagtaaacagtgtcggcttcttttccttgaaaggtatgggtagttcctattgagcttcgagtccaatcatttactattttctttggtacatttaattctgctaaccgctttttaattgtttttctgagaccatctttcactgctgtaaagggagtaataacatataaatcaggagcatttaatgtattttcccatttttgataaatctcttcagcaactaaatctgcctgctcttttacaaactgcttattaaccgctactcccttacagtcaaaccattcgcttttcccttgtttttttatcgctaaaaccattttattatcataagcaatttgattagcgattgtaaacattggatttaagcatctcctatgaacccataaaggtatccctatccactgtcctttattgttatacattccaaatggattcgccgcatccgccagtgattgtacagaactccctatttcaataaaccgatcttcaataccataaaatttttttatatctcctaatattgttcgatcaatggtgacaactggttcaatctggattggatcaccaacaacgacaactttttgagacctccataatgcgcctgccgcttgttgcggagtagcttgtcccgcttcatctataaataagtaacgaataaaatcacgaccaactcctttatacattgttcgaacactggcaaaggttgtacttattacgggtgtgattaaatggattacaccccacatatgttgtaaccacattctgtgctcagtctgatttaaatctaacttacttcgataatttaacaaacgcaaacttgattttattgctttataattaaatatcaaaaacaatttgtggactttcattccctttaaaaaaagaagccctctttcaaaattcaattcatcagttagccaaggagtatgtaattgcctatattcatatgcactttgagaattggtccaataattatcatcgggtattactaacccctgatttttgcatttattgttgatagaatccctatatttctttaactccatccttatttgattcgatctcatctgcaaaagatcccattccttttcttcattttttattttcatagttattttttgcagttgatcttccatctgtaataatttgtttctttttgtatgaaatattctttgaaaaaaagttggtttagaaagcgtgtgaaactctctctctaacaaccgtttctgttgtttataatgagctgtctttaatactaacttttcttgttctgcctctagtaacaataactgattatttatatccttatattttttaaaaatttcgcataacgattgtagttctgctttcttttgtttaactgatttcaatgtttgttggaaatctgttactgcattcttccaatctgttaagcttatttttttattttctcgttctaattgctcgatgaatgatagttcaaattcgttattatttctataataaagttttttgtaatagtgagatatattttccgactttcctaaagatgctgagaatagtccccaagtatctgtctcttcacctagaagagcctttgccgcaaaaggaaacatcgataattcctctgcttctaatgcatatgctttttcataagaagaaaatacattttcatctgtaactttacgtataacttccttctttttaggaagatcttttgagatattttcaactgctccattattgcttgaagccactaccatagaatactgattaatagatttatcaatttcataaatagtataatgatagccatctaaaactaatttctttatttttttcagagctttttctgggttttcaaaacaagccattttttctgctttttcaaccatgagatttgcaaaaatatcttttaacagtgtcgttttccctgttcctggcgggccattcacagagcttatcttttgattgttatttataatttgatttacagctacttgctgcattaaggataatctatgttcaacaggtgacggccacctgccgttaggtacatttttaggctgcaacacatcttcaattaaaactctattttcatcaatgttcgttctattatcaaccccttcaataaattgccgtagtgtttcattttctccttgtgagataatatctcctaagtcctctaagaaaaagctatgaaaattatttacccgtccatcttgtccaaccttcaaaatttctttctcaaaataatgaagcgccatattatctattcgtaaaaaataccgttcatatactccaagtactttcttaagggctttttctgttactccatttacaaagatggcatcaacctgttcctcaaataatctcaactgatctcgaaatgtagtcatcaaatcatcatatggcacttcaagatgttcgtttattaatttcatcacatacataagtacaggtacaaatgcagaatcctttacatacttgcctgtatggtcaactaaaaaagacatactaaataacattttctgatctctattaatcatttcttcattattttggaatagatcacgtagatagctaacaagtttatgttgctcaaagcaacctaaatagtaacgaaattgaataaaatttttttcagagtccttcaactgatgcctctcccaaggcctttcagaaaaaagaacttgttctgttttctttcgttgttgaccatctaaaaaatggcttctactcaattcatctcctataccattgactccgcttggtgataaagcctcaactaagtgccatgcccttaatacagaatttacatttatcttccccataattccctcctatttttaacaacatcattcggttattgtcctcaattgatccaactggtatctgtaaaaaatccctaaactgattgatcagtctcttttctttttttcgacacatttgtttaaatattgaataattaactagatcacacattaaaattattagattttagaacatttcattttagtaaaaattcatgactgattcataaactctgagatcatttgttaaatttatgatacgatgacagtaaaaaagacataacaggggctagtcatatgagtgaacttgtgtttgaaaaaagagattttaatacagaacaaattcttgcgttgaaggcatctcgattagataacaatccgattgtatacattctttataacgaaaaaaagaagccgactgcatatattgggcagactgtgcaggctgcacgacgattgaaaaatcatttgagagacaagaagcgaataagtttaacgcgaaccattttcattggtcatgaaagatttcatcagtcagcttcctacaatattgagacaaatcttattaattactttattgccgaaaatcactaccaattgcaaaatgtcagtcagacaagatcgagagaaatgcatcattattatcaaaaagaattttataacgaacatctttttgaggaaatttggaatcagcttcggaaagagaatgttgtcagcgacacccttgaaaacctcagaaataaagatatttacaaactatctccgtataaagagctctctccccagcaggtggaaatcaaaaatgaaattcttgatttttgcaaggcgcatattgaaaaaccaggtaaccatgtcatttctatagaaggagatgccggaacagggaaaagtgtcttactgagctctctatttaacacgattcaggatttatctaaagatgaaaattcacatttaaaaaacaagaacaattacttacttgtgaaccatggtgaaatgctgaagacgtataaaagcatcgcaaacagcttaccaaatttaaagaaaaaaaacttaatgaagcctacctcctttataaatcaaatgtcaaaaacaggggaaacagctgatattgtattagtagatgaggctcatctgcttttaaccaaagaggatagatacaataatttccactatcgaaatcagctagaggaaatcattaaacgcagtagtatcactattgtcatcttcgatcctaaacaagtgttaaaaattaaaagctattggaatgaaaggttgcttgaggagatcaccaatcaatatcatgcgaaaacagtaaagctcacggagcaaatgagaatgaatgcaaatccagacacactaaagtggattaaccattttgtctcaaaacaattgctccctctgccgcaagaaaataatgataccttccaactcaaaatctttgaggaccatgccgactttaaagctgcaattgaaaaaaagaataatgaagtaggtctatcacgtattgtctcgacctttgactatatccataaaaaagatggtgctacttatatggtcgatgaggaaggcattaacatgccatggaattctacaaatgacaaatggacttgggcagaacatgcagattctattaaagaggttggttcaatctatactgttcaaggttttgacctaaattatgttggcgtcattctaggaccttctgtcagctataatagtgaaaaggatgagcttttcatcgacactgcaaaatataaagatacaggcgcattcaccaaacgagatgacatgtctgccgagaaaattaagaaaataaaggaagagattattctaaactctatcaacgtcctcatgaaaagaggcatcaacggtctttacatttacgcaacggatgtaaaattaagaaatagattgctagagttaaaaaggagaaggaaaaaatgagcgaaatcaaagatttaattaacacgattaatgaatttagagacgcacgcaactggagacaataccacaacccaaaggatcttgccatctctatttcaattgaagcggccgagctgttagaagacttccaatggaaaagcagcgaagaagcactcaaagcaaacgaggaaaacattcgtgaagaaattgctgatgttcttatctattcgctgatgctttgttcagatcttaagatggatgtgaaagagattattgaggagaaggttgtgaagaacggtcggaagtatccggttcaagggtaattatatttcttacaataattaaagcaatcttcactcctcaaaaaataaaagtgcatgacgatatatttttggaatgattaacaaatagattgattcttctgaatatattgtagctcaacttaccgctgagtgacagaaattaatcatagatactgagtttaaaatttactttggatttactaatgtaaattattaaacttaggattttattaaaacaggcatattcaagtatgcctgtttactactttaagaaagaagtaacctcattcacttatggtaaggctctccgtagtgtatctacttttgttctagttcttttaaaacctttaagtcttcataataccttaacaccgtactttgcattactaactttctattggcagaatctctaatgttacgaaatttctcattataaaacagagtaaaatcatgtattgtgctaaataaggttatgttagcttgtacccattctgataatgtctcatcagaaaaaggtaagtcatttgattcaaaaaataaactatccaacactgacgaataaggtgttacacttgcaaataactcatcttcaaaaatagtctcattttgatactcattaaataatgaaattatagattcagcatatgttatcatttgatacctaatttctttaactttatatagtacttcatcgttaggcttggtattatcaaaaataaaattactaattatcttatattggggataaaactcaaaatgaacaccttttattaaatgtttattagagcctttcaaactataccaataagtcttatcttgattatcgcttacccaagtagttttacaataataatttcctcgtaaaatatcactttcataaaaagtgaaataaatccatattatatctgatggacagcctttatatctatcttcttgtattttgttattatatacatcgcaaaacagtaatctttttttaatttttgttgagacgtctgctatttctgcatccgagaatggtttcttaagaagtatttttgccgcgtacctttttttagaaccatgatggacaggttccacactcttaatgatgtaatcctcgttttcaaggtaaatattatcttttttataaggagtatactctgaaattttaaaataaattgtacctcctatattagctctatatatagcatgctgaggtgtatccggattatttaaagtatgaatctcaagtaacctctttacccacaactgcaaatcataaagtgaaatttctcccttttttattaaaaatttattcgtcagtccatcgcataaaatatttgtaaatatacttccattgctccctccataagaaggttcaatagcgttactaccacttaatatcgcataaccgctaccttgaaaagattctatagattcttctaaattagtgctttttgtaccttcaactctaaaattacctgaatagcagcagtctataagcaatactttgcttttagctaatgactcgcctattttattaattatgtcctgagtacataataaaccatcgctaaaaacaatattatgaatttcactagaagtcccatgacctgagaaataaaaaataaatatatcatctttttgtaaattgccaataaaaagctcaagggcatgtacaaaatcgacgattgctacatgaccgttatttgtcatacccatttgaaaaatatccatatcatccagctgtaatccttctcttaacgctttattaacattaattatgtctgttttacaaaatggtaaatcaggtgcaccgatacctgaataatcactaactcctactataaatgcctttatccttcccatataaatcaccccagcttcacttgtttatctgattaagattgtaataatcatataaatagacaagcccaatttttattaaagaaaattgggcttgtctatattattctggttgttctaatcgtgattgaatgtttttccagtgtttcttcacttgtgtttccataagatttatagtttttgaatcttcatcaaatatcttctgtgctctttcaacgtaactaataaaattcccatgccctttcttactttttcccaagtgagagtagttcttatataattctctcctatacgatttacgaccgaatttttttgatttacgattgcatatccttactttacgatatgctctcgtataatacttaaaaagacttttttctctaattcgaacttctttaccattaaaactgaaccctagatagtctaatattgtctcatttaagtctaaatcgataatctgattatcgttataaaaataattccctgtcttctcaagttgaatttctaaatttggaatctgttcttttatatcttccaaaattttttgatgaatttgatagttatagtcttgaatgcctccttcaataggaataactataattaaatcatcacaatatcttctatatagcccattttgttctttaacatatttttgtatttttttatcaaagtccagcaaataaatattagaacagactgaactgatacccgctccttgaggaattccataccttttagaattcttgtaaatatttttatgcttaaatgctctaaattccttctctgtgaaatatttataactactttcaatttcactttcagtgtattttgtctttaattctgcttctatagtatctttaataaagtaactaaatcttgttatattcttgaagacattataataatcgtcaggtaaggtatccttttttagaacatagcggattttctctttaagatacctatgatccaatgtatcaaagaaattagtaaagtcagcaacaaaaatatatgcactttgctgcacttttataaaatcaataacttctttagcgaagttaatattactttttccagataagttattccgatatgcagttgcaacttcattaatacctagttcatctacaacagaattatagtggttatttagcttgtccccatagtacttatagatatagctatccatatgagacgcatagaaaattttacgaactttttcttttcgctttttttcttttctgctatatttttgaaatttaatttcaaaatgcataaacgggtaaaaaccatgtttagcaacccatcgagggttctggattttactcttaactttttcaattgattttttattatcaaggtgcttataaccctttacacgatactttttttcattcatatttggcagagctagcaggggtatgtaatcgtagcctattactctctatcaaaaaccctgctagcatactctcctttcgaattatagaccattgctagcctataaagaggctactgaatgcactaatagcttatactataatcagtatattaaattggttgtttatgacgattggaggtatccaaatgccaagttattcagaagcgttatcgattgtaatcgactggataagtattatgattacaattgagataaagcttgacagaaattcaccaatttccctcataactacttttatgaggcgttaaccatattaatattaccatctaaaatttaaatagtcaaaaaagtcaatcaaaagtcatgttttgacctaagatctgaaattaggtatcttgaaaaatataaaatatattatgtaaatatatgagttttttatttttagaagtcgatgatcttcaactgatttgggattcaattaatgatactcaactagttttccacccaatataggcatcaaccggatcgattgattatctgaaattagaacattttacgtaggaaaaagaagtttctttaattcttgatagaaacctttttagtagtttattgtctcttgctaaaaatggtgatctaaaagacactacggaaaaaagaatgattgcttttttaatgttatgggctcaattgaatggaggttccaatcagtgctggattagcaataatggaaaatgcatcaagatacaacgattcttgcaatgctaaaatagagctaaataattttaatgatattttcgatttttatccacctcagatttggttaaatttagctcgtggcacaatagaccagattccaaagtgtaactttttcaatattccatatgaaaactcaatcacttatcatgacactaatgatcacttcctaatgaattatgccagcatgttgcatttagttaatatatatcgagactctgacatggctcctttagaaaaattattagaagtcctaagttggaactttgacaatttactcatctctcaatatatcaatagatatcttgttatgttattttccaatcaaaatggtatcaaagcacctaaacacgctaatagcgatttattagaaagaattgaaaaaggttgtatgaatcaagcatgggatttaacctatctatcatgttggagtacactttactggaatgaatcaaaaacgcatgaggtttttttatttgctaccgccgataatctgttaaagaaaatttttattaacacacataatggtagagatttatttaatttaattaatattgcttttcctaaaagaagtgctgataaaatcattcaattctatattgaaaaaacaagaaacagaattttggggataatccaactcaatatttcaaatctttaattgagaaagaaaaaaagcatttgaaacaatctgtgggttgataattttcagctgtattacctaatgtcattccctttgttgtaaattcaaatatacaatacaaactttaatataaccaaaacagtccctcccccatttgttggggaagggactgttttggtatacaggtaaaatctcatctacttatgatacggctccccacgattaatccgaaaagcccgataaatctgctcaactagtatgagacgcatcaactgatgaggaaacgtcatttttgagaacgacagcttctcgtccgctcgcttcatcaccgcgtcgctcaatccgagtgatccgccgatgacgaaggtgactttgctttttccatatgtagccagcttatctattgtatcggctagttcttcggatgttttcatttttccttcgatggcgagggcgatgacgtggacgtcggggctgattttggataggatgcggtcgccttctttgtcttttatgattttcatgtcctggtcgcttaggttttccggcgctttttcgtccgggagttcgatgatgtcgatttttgcgtaggccgaaagtcgtttggtgtattcttcaatgccttgcttgaggtatttttcttttagttttccgattgtcacaatattgatattcacaggtcatccccactttaaaaacaagttattcatatatgttgtccacaattgtggatatcttttctgtattttgtgtaagatcattcgttccccactatatatactgcggggtctccacataattcacaggctgtggataaactgttagtatgttcgatttttctgatttcgggcggcagctcgtggtcgtctatgtacatatccagcaccgtttcgatgtgttcttcacaagaataatacgcttgtttcatgttcaaatcctccgatgttttcttccatttttacaaatgttctcttctcaatataacctatttattcacatgttagtagtgcttcgggctgagttttatccacaattcgacaaacaagctgttgatgactctatttcgctcgtgtgttagtttggatgtaaccgatgtgtgaggaggtctacatttgcgctttagatgggtttggctttttgtgatcatgttgctgcttgctgggtgtcagccgtcttattgggtgttggagaaggatcgaatcggtgaaggcagtccagacttagaaatatacgctaattaccttcaaatgcatgatgatgtaaaaggatatcaagtcttcaccatatcagaaggcaaaaaaatggtcgtcgtgtctctcggaagcagcgagaacgaaaaacagcttgaggtgtcagacgtcaaattctcacctaaagaaacgattgtaactgtgaaacgaaaacctgcttccaaagctaatgagaaaaacccttatattctgattggactcgataaaatcgaaggggatttaattgtccaagacgaaacaggatatcactttgaagaaacagattaccagcaataaagccggcgttctgagaacgtccggctttttcttttacttcaatgtcccatgcgggtcgatgacgaattttttggctgcgcctttgtcgaagtcgctgtagccttttggcgcgtcgtccagagaaatgacggtggcgttgacggcttttgcgatttgcgctctgccgctcaggattgctttcatcaaattgcggttgtatgtcatggcgggtgtttgtcctgtgacgaaggtatgggctttagcccagccgagtccgaagcggatttttagtgagcctgttttagcgtcggcatcctttgcaccgggatcttcggtcacgtataagcctggaatgccaaggctgcctccgacctgggtgacatccatgatcgagttcagcacggcggcgggcgcttctccttgattgccgtgcccagatgcttcaaagccaacacagtccactgcggcatcaacggttggttcacctagtatttgttcaatttgttcgccaaggcggtcgtgtttttgcacgttgaccgtttcacagccgaagcttctcgcctgtgccagtctgtcttcgttcagatcgccgacaatcacggtggaggcgcctaggagctgagcggagtgtgcagctgccaagccgacaggccccgctcccgcgatgtaaacggttgaacctgtttgcacgccagctgtgtaagctccatggaagcctgtcgggaaaatgtcggacagcatggtcaaatcgagaatcttttctagcgcctgttctttatcagggaatactaaaagctgaaaatcagcgtacggcaccatgacgtattcagactggccgccgacccagccgcccatatcgacgtagccgtaagccgatcccggccggtccggattgacattcaggcacacatgcgttttctgcgttttgcacatcacacagcgtccgcaggcaatattgaaaggaacggatacgatatcgccctttttgataaattcaacatcacgccccgtttcaatgacttctcccgtaatttcatgcccaagcaccaagccttctggcgccgttgtgcggcctctgaccatatgctggtcgcttccgcaaatgttggttgtaatgactttgagaataaccccatgctcacattttcgattcacattcgcctttgggacgccgggcccgtccctcaagattaactccggataaccgatatcctccaccgctacagtccctttgcctttgtacacaaccgctttgtttcctgtcaacgccattcctccctttcatgtgtttggacgcttggtccttgaacatgacttcggtttggcatgaccctttccctttctcacgactgttttttctgtattcttataacaacaaatatgccaagaaagcagccaataatggttccgccgatgtctaagaagtcgactttacatccatttaacaggaatacagtaatggccgaaaccaggctgatcataactgccagaagaataacccgtttggtgcgcatgtaattcctcctttagattcgtttctaaaccatacccaaaatcctctgcaaatttcggttcaacaaaaaaagagacttcacaccagtctcttcataattagagatcaattaaaaaatttcctgagaaataatgtgacaatactggttaccaacgcaatcgccgtatacataacaacccaaaacatgaatgagctattacccgaagctaacgtaaataacaatatcaagctcgcgataaggacgatgagcggtgccacccaaaatcttttaaataaaaaatgaccggctataccaaatacacctgcaatgatcggaaaaccaaaaacgataaataaaacggcgatagctcccatactaacctccttgccctaaaaccccttcatcacctcaacatcatacagcttcaaatgactcttcggcgtcacgacatcctttaccttcccaatctctttttctttcattttctttccggttttcagactgtactgttcaatgtaggcaggcttgttatacgtgtatgtgaagtaatagaggctgctgcctttttgggtgatttctttgaaatcggctttcattttgtcctgggaaagggtgaaggcgatgtttgtttttcctgtcttggcatcgattttgtgtacctttccgaagccgtcaatgaaatacaggttcccgtcataagggaaaaagctgtttttaaagctgaagggcatggagctgtatatcgtttgttcgtcgtttttgtattcggcgatgtcgtgcagctctactttgccgctttttttgttgatcttgaccatttgatagagattgcgggctttttggccgcgaaccataacataaacagcttggtcgtccacagcaagctgggattcgactgaggctccttcccggtactgccattccgatatcttgtggtaagtgagcttcttttgatctgcttgaatctgaaggagctcatagcctttttcgtcagctgtcgggacaagtgcgtaaatggcgccatcatggaaaccggaggctcggatgtagtaggggatgacgtcttttttccactctccgtctatttggcggtacagctctgagcggtatccgtctttctttttgtcgtagccggagttgtataaggtgtaaaagccgtccgtgttttgcagaaagcctgcgctgtcgcctgtgtgctgataggttcttttatgagatctcaggccgtctttaatcgtataaatcttgtttttgtcctccagcatcacactgtcgccgtgaaccttggctgatcccagctcaaggcccttcatctgaaatgaagacagcgacccgtcctggctgataaacaaggcatagcttttcccaccgccaaatgcatcttgatccgcagaggttgaaaaatataacaggacttctttgtcatccaagaaaccggagtctcgaagatcctggtgacttacagttttatggctaggagaaatgaagacaaatagtgcgattcctgcgagaatcagcatggcgatggtaatcatccactttttcatatccttctccttagtaaatggtcatgatggttgtcgtatacgaagaacttgtgatgtcgcgcggatacacgcctaagcctccgttgctgtctatatcaatccctgcttttagcaaaaaggcagaccataggagctttgaacagtttttggcgccgtcatggcccgtatttctgttattgacgaagttaaatgagtatgggtcgccgacttttgataccgcccagtcggcagcagctgttttttgagatgaggatacgctgacggtttgcacaatggagttgtcttccacgtctctggcattatacgcgatctgcctgacgccgtcgctcgggacagattcaacaattttgtcagcggcggagtacatgccgacgtggccatgattgtagtaggctgtgtaggagttcgtgtaatagatattgcctttcgcgcttgtcgggagttttttcgtgccggacgacccgcccatgatagacatgccgctttccttggcgagccggtctccttctgctttatcagccgtgatttccttatagaactgttttaggataacgtcctgctttacgtgctgctgtttggcaatctggctggcagatttcatgatttcttccggtgtcgtgcctggctgcagtgcggcgatttcttcagcataatttgtgttctttacggctttggcgggagaaacgaacaggccgccacacattgtaagcgctaccaaaaacatcgacactcgtttcttcaacttcattacatctcctcttttcttgtgagtgtaggaaagggaatttcctcacccacattatattaggaaaataaggaaagtaactaggttatttacagaatttttagaaatcgtttacagaaaaaggcctttatcaggcccttttcgttaaatcttcttgctcatcactacgtctgtttcttgaaatccggtttgctcatatagctttcgcgccgtctgattatgggcaaagacatgaagggacagcttgcggattcccatgctgcgtgccgtttgatctaatgccgccaatgcttgctttgcgtagccctttccccgatacggttcatataacccgaaatcataaataaacgcttcctgctgcggatgctccggttcagcatgtatccagagccagccaacgatatccttttcattcagcttgaggctccacaaatggtgatggggtgtttccagccctctcggaagcagatcagtaaacgcctgcttagacaaaagctgtgcatcttcaggcagccatgttcccgcttttaccttttcttccgcgtaatgctttgttgtgtacgtgagataagaccgaaattcttctgtctgcattggggtcagcatgattgtcatatcatctctccttcatatattgactagaggattttacataaaatagaaagaggtgttactatcagaataagcaactgagattgataagtcactagagaaaggagtttcacatgaataagatcgcacccgcagaaatcgctagcatgctcaacgattggtaccttgccatcaagaaacatgaagttgaagaatcctcccgtttatttgaagaagtgaagcctttattggacgacatggaagaggatcaggaggtgctggcctacttctccttattggaactgcgccacaaggttttgcttcacgaggcgagaggacagggctttcagcatgaggagccttctcatatgaatgctacgtctgacatgctgaaatattacttttttctgtttgaaggcatgtatgaggcctataaaaataattatgacattgccattgggctgtataaagatgcagagcagtatctcgacaacattcccgatccgattgaaaaagccgaatttcacctgaaggtcggaaagctctattataagctgggacaaaatattgtatccctcaatcatacacggcaagcggtcaaaacgttcagggaagaaactgattataaaaagaagctggcttcagccctgattaccatgtcaggcaattttacagagatgagccagtttgaagaagctgaggcttacttggacgaagcaattcggatcacgagtgaattagaggatcatttttttgaagcccagcttttgcataacttcggccttcttcatgcgcaaagcggcaaatcagaagaagcggtttcgaaattagaagaggccttacagaacgaagagtatgcccgctccgcctattattatcattctgcctacctgctgatacgagagctgtttaagatcaaaaagaaagaacaggccttatcttattaccaagacgtgaaggaaaaattgactgctgagccgaatagaatatgtgaggcaaaaatagacattttatatgccatttatgcagaaggaggtcatgcggaaacgtttcacttatgcaaacaacatatggatgacttgttgtccgagaaagagtatgacagtgtaagagaactttccattttggctggcgaacggtatagggaacttgagctttacaaagaagctgcccactttttttatgaagcattacagattgaagaactgattaaacgaacggaggttatataaatgaaaagatttctgattggcgcaggcgtcgcagcggtaattttatcaggttggtttattgcagaccatcaaacccattcacaggaaatgaaagtcgctgagaaaatgattggataaatgaaaaacccccgcgggtgcgggggttcaatttaacgaaagaatcctaaaacggtttgtagttttaggattctttcatcttttcagcgtgattgaaaacccttgaagtctaggaagaacgagcattggagcgcagcgaatgtttggaattcgtgagcaccgaagcgcaggcctgacaacgaatgcgagggtttgtcgacacgctgaaacccccgcgggtgcgggggttttcttattacagcagcttcttccctagcagagattctacgagctctactgctgttttacccgttttgtttttgtgatcaaggatcgggttaacctcaacgaattcggctgaggtaatgatgcctgcgtcatacagcatttccatagccaaatggctctcccggtagctgatgccgccgacgacaggggttccgacacccggtgcgtcgttcggatcaagtccgtccagatcaaggctcagatggacgccatcacatgctgataaataatcaagggtttcttcaatgacctttgtcatgccaagacggtcgatttcgtgcattgtgtacaccttcatgccgctttccttaatgtacttgcgctccccttcatcaagtgaccgggcgccaatgatgacgacgttttccggtttgattttaggcgcgtagccttcaaggttaaccagtgactcgtggccaatgccgaggctgaccgcgagcggcatgccgtgaatattgcccgatggtgaagtttcaagtgtattcaaatcgccgtgcgcgtcataccagatgacgccgagattatcgtaatgcttcgctgtgcctgcaagcgtgccgatcgcaatactgtggtcaccgcccaggacaagcgggaattttttctcttcaatgactttgttgaccttttgcgcgagtttttcatttcccgccaaaacggaattcaggtttttcagttcctcgtcatttttgattttttcgcggttgatcggaatgtcaccgagatcctcaaccgtataccccatgtctgacagccgctcgatcagatgagcgtaccggatggcactcgggcccatatctactccgcgtcgtgcttgtcctaaatccattggcattccaataaccgaaatcgttttatccatctgtgattccacctcaacatttaagataatgtcctatgcgggttctaacaaagatgacttacggacaacgttttaaagctctagctgacgattcgcctgctggcgttttttaatgacgacatgataaatgatgtagcaaatgatcataaacggtacgccgcaatacagcgcgatacgctgctccggatcaaatgcgagactgatgagcacgaccgtatttaacgttagaccgatcagcggaagcaccgggtacagcggtgttttaaatttcaaatcttctatcttcccgccttcgcggatatatttgcgtctgaacatgatttgggaaagcgaaatcgtaatccagccgacctgtgcgctcatacccgccaaagataacagtaccatatagacagtttcagcctgcgcaaactttgtcagaagtgataggcaggccacagccatcgttacgattaacgagtacatcggtacaccgcgctgatttgtttttccgagcgctttgaaggcctgtccttcattggccattgcgtacagaatacgcgttgatgcgtataaacctgagttcgcaacagataacagtgcgattaaaataacaaagttcatgatatcagctgcatatgggattccgatttgctcaaatacggcaacaaatggactttccacgacacccgcctgtttccacggaatcatgccggcaatgacaatgattgaaagcacaaagaagacaagcgttctccatactgtctgtttgattgaccgtggaatcgttttttcagggtcttcactttctccggctgcaaccccgatcagctcagtcccctgaaacgcaaagttcacagtaatcatcgtaatcagcattgcctttatgccgttcggaaataacccgtcttcataaaaatgtgtcaaaaacggcgcctgctctccgcccttcagatcaatcaggccaaacatggcagctccgccgagaataataaataaaaggataatcaaaattttaatgcctgaaaaccagaattctgattctgcaaaggcttttgtggtgattgcatttaaaataaacatcagtgccgcaaagaccagacaccaaatccacacgtctatatgcggaaaccagcgttgcatcagctgccccgctgataaaaattcaatggcgcatgtaaccgcccagccgagccagtacagccagccgaacgcaaacccgaaggccgggctgataaattttgtcgcataggtctggaaggatcccgacacaggaaaggcgactgccagctctcctaagcagagcatcgtcaaaaacatgataaagccgcccactaaataggacagaaccgcgccgagcggtcccgcttggttaatggtaaacccggttccaaggaagaaaccggttccgatcactccgcccaatgaaatcatgaacaagtggcgcgatttcattgtccgctggagctgatttccgttatcttggtttgtattcacattctgcaccccttcagcaacttgtattggatctaagctggaacatctgcatggtgctatcccagtttgctgtccaaagagcctctatctatttaatataaaattcacttcttctcataaagatacattatactaaaatactgtagctgagcaaatagggagtgctgatttttctgttgtaaatttatacaaacgaagtgaatatcccgccatggtgcggatttatgcgttttgcagcacgtgcttaattttctctatcgcccaatccaaatcctctttggaaatgattaatggcggtgcaaaacgaatgactgtatcatgcgtttccttgcataaaagcccttcttccttcaaacgctcacaatacggacgtgccgcttcagtcaattccacaccgataaacagccctctgccgcgaacttctttaataaccgggttgtcaatgctctcaagctcgcttttaaagtattcgccaagctcaagagaacgatccgccagcttttcatcctccagcacttctaatgaagcgatagacactgcacatgcaagcgggtttccgccaaatgttgagccgtgtgagccagggttaaacacgcctaggatctcgcggtccgccgcaatgcatgagatcgggaacacaccgccgccaagcgctttgcccaagatatacatatccggaacaatgccgtcccagtcacaggcaaatgtcttgcctgtacgtccgagacccgtttgaatttcatccgcaataaacaagacattctcttccttacaaatcgccgccgcttcctgtaaaaatccttccggcggaatcacaatgcccgcttcgccttgaatcggttcaaacaagaatgccgctgtattcggcgtaatggcctgtcgaagcgcttccacatcgccgtaaggaatgagtttgattcccggaagcatcgggccgaatcctcgtttatattcctcttcagaagagagagataccgccagcatcgtgcggccgtggaagttcccgacacatgcgataatttccgcttgattgtcagctacgcccttcacttcatacgcccagcgtctcgccgctttcaccgcagattcaaccgcttcggctcctgtattcatcggcagaatcatctctttgcctgtcagtttggctgttttttcgtaaaacggcccaagctgatcgttatgaaacgcgcgtgacgtgagggtgattttatcagcctgatcctttaatgcctgaatgattttcgggtgtctgtgcccctggtttaccgcagaataagcactcagcatatccatatattcattgccttccgggtcctttacccaagcacccagcgcttcagaaataacaatcgggagcggatgataattgttggctccgtaatgagacgtctgatcaataatttctttggatttagataaagctggcatatttgaattcccccttgttttctgtttcaacatgttatcctgctttccctttatataaatgcaagttctgtgccaaatcaagaattcgtgtgttttctacaattttcgaggacaaggtgcaaaaacattctgatatttcgagcaaaaatttcagcaagtgcaaaattcttttgcataccctctccatttttttataaaatagaagcaatattaagaaaactgagggaggttcatacagtggtcaaagacagcgaattcctcacattggtttttcagagcattttagatgaaatcgatgttggcctgcacgtggtagacgagcatggaaacacaatcgtatataacaataaaatgatgcagattgaagatatggagaagcatgacgtcttgaataaaaacctgatggatgtgtttatgttttcaaagcagcaggacagcacactggtacaggctcttcaggaaggaaagacgattaaaaacgtcaaacagagctatttcaataataaaggccaggaaattacgacgatcaatcatacatatcccatcgtccaagacggcaaaatcaggggcgccgttgaaattgccaaggatgtgacaaagcttgaacggctgatcagggagaatatgaacaaaaaaggcagcacaacctatacgtttgacagtattctcggcaccagtccggccattcaagacgtcatcgaaaacgccaagcgggcaacccgtacgtcatcatctgtccttctcgcaggcgaaaccggcacaggaaaagaactgttcgcgcaaagtatccataatggaagcgatcgttctggcggcccgtttatttcgcaaaactgtgcggcattgccagacagccttgtggaaagcattttgtttgggacgaaaaaaggcgcgtttaccggcgctgtcgaccagcccggcctgtttgaacaagcccacggcgggacgctgctgttagatgaaatcaactcgctgaatctcagccttcaggcgaagctgctgcgcgcccttcaagaacggaaaatcaggcgcatcggttcgacaaaggatacaccgattgacgtacgtattattgccacgatgaatgaagacccaattgatgcaattgcaggcgaacgaatgcggaaggacttgtattacaggctgagtgtcgtcacactgatcatcccgccgctacgggagcgaaaagaagacattttgcttctcgcgtcggagttcatccagaaaaacaaccatctgttccaaatgaatgttgaacacatcagcgatgacgtgaagcaatttttcctttcttatgactggccgggaaatattcgcgagcttgagcatatgatcgaaggcgcaatgaatttcatgacggacgagcaaacgattacggcttcccatctgccctatcaataccgaatgaaaatcaagccggctgacattccagagcctgaaacaccaagacaccagccggccgcggacttaaaagaaaaaatggaaagcttcgaaaaatatgtgatagagaatgtgttaagaaaacacggccataacatctcgaaagctgctcaggagcttggcatcagcagacaaagcctccaatatcggctgaagaaattttctcactcgtctaacgaataatccggagcaggaagcctgatcagaaaaacagtgcctctgccgatttcacttttcacttcaatcgtcccattgtgattgtcgataatcgatttcgttatggcaaggcctaatcccgaacctccatatttccgggagcgggatgggtctgccctgtaaaatcggttaaataaatgcggcaaatgctccggcgcgatgcctgtgccattgtctgctatcatcagcatcacgccggaactgcctttttgcagagaaatagtgatggcaccggttctctcatttgtatactgcaccgcgttataaaccaaattcagaatgacctgtttcatcttatcccggtcaaacaccgctttagcatcatcctcaagcagcagctgcagccttctttcttttgcaagcagactgagctgcggctccatttcccttatgagcgcatcgagatttcctctcttcatttcaaagctcggcacccgatcaatttttgctaaaaacaacagatcctctatcagccgagtggctctcttcgactcttcatacatactattcagcgccctatctctctgctccggctgaagcgcggcgccacgcagcagcacttcgataaagccgtgtatggacgttaaaggcgttctcaattcatgtgaagcgtctgatacaaattgccggatgcgctccttcgcctctttttctgctttaaatgacgtttcaatccgctccagcatgcgattaaacgaaatagcgagcgtgtcgatttccatttgttttcgatatacaggaagccttttattcaaatttcctgcattgatttctcccatcatatgtaccatttgtgataacggtttaagcgtatgtctgaccacaggcaagaacgtgaaaagcccgagcaggagcgcaaccagcgagagcgtggaataaatgctgatttgccggagcagtacgtccttcagtggttctgttaaagtactcatttggatcacgcctgcttcttttccatcaatagtaatagcctgaaacacaatcagcacttcctcgccggattcatttttcgtgattttgtaatgcaaggccatcgtatcttttaatgcctcatcatatacactttttttcactgttggcggtgctcccgcatatggatcggtcgacaataccgtactgtcttttgttttcttatcgataaaaacaatggtcacgcccggatagataaaggcgggacggacagcaccatctgacttttccgagctgtcgggatggcttttgtatgttttaatattattccagatggttggctccgttgagttgatataactttgaatgctgacagctcggttttcatataagaggcgttttccaaacacatattgcatagcgccgacaaacaccaatagaagaacgagaatgcataatgaacggaataaaagctgaaagcgcagtgttttgaatcgttttttcattcaatatccacccgatagcccgcaccccgaaccgttcggatcacttcatgctttttgtcattcaatttttcccgcaaggaacgaatgtacacttcaacaatattctcttctccgtaaaaatcatacccccatactttatccagaatccttgctttactgagcacaaggccgtgattcagcaccaaaaactttaaaagctcgtattctgttgctgaaagcttgagcacctcttcctgatagcggatttctctgcgccgatcatcaattcgaaacggaccgagcgcgaattcttcaaacaggttgggaaagtgatcccgaattctcgcatagattcgcgccagcagctcttcaaagctgaagggtttgatcatataatcatcagcgccctctgtcagcgcttttacccgaacccccacctcatccttggccgtaagcataataaccgcggtatggccggtttttttcatcatcctcgatacttccagtccatccattccgggcatcatcacatccaagatggccacatgcggctgaaatgtctttacggtgttcatcgctgtcattccgtcagctgctgtcttcacttcaaagccttcattttcaagacccattgtcaaaaaatctaatatcgccggttcatcgtccacgagcaaaatcttgatgcctttcatcctattcatgctgtgctctctccttagttggcataaacctctgattagttttttcccttcccctcctattattcgtttttacctgaaaacaaactgaatcttccctaaaaatcagctgaattcagcaagttttcagccagccctcatttgattttcagcttcggcctatacaattgccttagttggtacagccaacaatgaaataaaggaggaatctcacatgaatatcactaaagttttatcaggagctgcactgggaacgattatttcaatcagttctttcacttctgctcacgccgctgtcattcaaaaggatgatacatcaacgaaggttgagacgaagcaacaggcttccatcacaatagcaaaggcaaaacaggttgctttgaacaaatgcaaaggtactgttcaatcagcccaaatgaagaaagtgaatggcacatacgtatatgttgtgaaagttctcggtgaggacgacaaacagcatacgatgaacgtcaactgcaacagcggcaaagttgtgaaacatgatgttcaaaagaaacaaagctatatcagcaaaacaaaagcccaatcgatcgctttgaaaaactgcaaaggtgcggttcaatcttctgagctgaagcaagaaaacggtgtttacgtttacgtcgtaaaagtaatgggtgaagacggaagccttcacacgttccatatcaatggagaaaacagcaaagtcgcaaaacacgagcaaaagaagcaagcacatctttctaaaacaaaagcgcatcaaatcgcactcaacaaatgcaaaggcgcagttcaatcttctgaactgaagaaagaaaacggcgcatacatctacgttgtcaaagtgcttggcgaagatggaagcactcatataatccatgtcaactgtgacagtggtaaaatcgtaaaacaagaagtgcaaaagaaaaacgcagccgttacaaaaacaaaagcacatcaaattgcactaaataaatgcaaaggcacagtgaaatctactgatttgaagaaagaaaacggcacattcgtttacgtgattaaaatcactgcccaaaaccacactgaacaaacagtgaaagtgaatgctgaaaacggaagcatttgcaaataaaataaactgcctgccagcagtaaaataactgaaattcaacgtataacaccagtcttgttttaacacaaagttctaagttcatgtctacctttttctaaatactcttttaaactgaacgtgcgtgacccgcgttcagttctttttctaaggaggacctacaaatgaatatgaaaatatgttctgcagctgctttaggagcgatcatttcaatcagttctttatcatccgcacacgcggctgttctgcataaagaagacactgctaaagttcaaacccagcagcaggcttctattacgctctctaaagcaaaaactgtcgctttaaagaactgcaaaggcgcagttcaatcagcacaaatgaagaaagcagatggcgtttatgtctatgtcattaaagtgcttggtgaggatggcaaaattcacacctttaacattaaccgcaacagcggaaaaatcgtcaagcatcacgttgaacataaacaagccgcgatcacaaaagcaaaagcacaaagcattgcgttgaacaaatgcaaaggtactgtcacatcttctgcattaaagaaagaaaatggcacctatgtgtacatcatcaccatcacagccagcaaccacacggtacaaaccattaaagtgaatgctgagaatggaggtatttgcagttaacagccatttgctgctgtttcacgtgtaacatccatcttgtatttttcttcatattcgatatatccttttcaactgaacgggcgtgacccccgttcagtttttttgcatatcaaaacagcctggcaaacgatgccagactgttttgattaacttcctaattggtctgcggaggacagcttgatgtctacagatttttcttttccgccgcggtaaaacttcaccttcacccggtcaccgacttttttctgataaagccgttttcgcaggtcaacaatatcatttactttgtatccgtcaaatcccgtgatgacatccagttccttcagccccgcttttccggcaggtgaaaaggcgtctacacccatcacaaccgctccattggtaacatgcttaggaagctttaatgtttcatcccaatgatagcttgcgatgtcgcttagcgatttcatctcaatcccaaggaacgggcgtttgacctttccgtatctctctaaatcctctatcacagggatcacgagcttagatggaatcgacaggccaatcccttcaaccgccgactcggcaattttcattgaattgatgccaatgaccttcccatccatatttaacaaagcaccgccgctgttcccagggttaatggccgcatctgtttgcaggacttctgcgttccagtcaggctgtccatcaccgtttgaatctactgggatcgccctctccgtacccgagatgacgccttgtgtgacagagccagcaaactcaaggcctaacgggttcccgatcgcaataaccggctccccagacttcactttatctgaatttccgaaatcggcgactgctttaattttatcgcttttcacccgtaaaacggccagatccatcagctggtcgctgccgacaagatcagctgatacacgtgagccgtctttcaagctgatttcaatttgggaagcgccttcgatgacatgatggttggtcacgacataagcggaatggtcatttttcttatagatgacgccagagccgctcccagcctcgccgctctctccccgtatatctgatttttggatgttcacaacaccgacaacggcgggcgacacattgctgacaatcttggtgaccgtattgttgacactgacattcaccgtcctgattgattcccggccgttattgttctgctgctgatctaaagcgcccgtatctagcccttcatttgaaaggtacggcatgataaacgccattaatacggcaccgacaatcacgccaatcaggcttgaaagaaaatatccttttttgcttctctttggctgttcaggagtagtatgttcttcctcacgttcgtaatccaccatattccatcctttccaagaacgttaatatggttatattgtgggttagaagctcctagaatagtcatgatttacatagaaaaattatacagcgcaaagcggagtggccttcttcggatcagtgtcgtataagtcaaatgtctcacccgtcacaaatcctttagaagccaatgtctgctgcacggacattcttgccagctccttcatgttgttgtcctggctcaaatgcgccaggtaaatacgagacgtctcatcgccaatgacatccgtcatcgccaaggcagcatcttcatttgaaacgtgcccgacgtcacttaaaatccgccgcttaatgctccatgggtatcttcccatttgcagcataccgacatcgtgattgctttcaaacacaaacacattcgctgaacggataatgcctttcattcggtcgctgacatatcccgtatctgtcattaacgcgagctttcggccgttataatggaacacataaaacatcggttccgccgcatcgtgggagacgccaaacgattcaacatcaagtccgccgaacgacttcaccgtctccatcggaaatacaaacttttgatcggtgtcaattttgccgatttgattctccatcgctttccaagtcttctcattcgcatagatcggaagcttgtactttctggcgacgacaccaaggcccttaatatggtcactatgctcatgcgtcacaaaaatgccgtctacatcatccagcttacgcccgatctgcgccatcagcccatccatggcttttccgctcaaaccggcgtccactaaaaatgcgtgatcctctgtttcgaggtaaaacgcatttcccgtactcccgctcgcaagtacgctaaattgcaagctcatgtttgtctcactccattattttcattgatctgtatctaaaatcgtactctccaaagcattcacagtaaaatactcttgtactgtctttttctcaccgttcacttttttctcgtactcgaccgtaattctccataccggcgccagcacctgcgtacttgtcagtggatattgtgctacatagccgaatttacagctcttcacagtgctgtattcttttaattgattttgatagtacaatagctcaaccgcatccatttcagtaattaagctttctttctggatttgcttgaaggtctcaagcgttgtctggtcgtacgacacaacctcgtttttaccgtttaagtgcaataccacttgcccgatcatattagcgggattatcggtcttttggtaaatataatggccttcgtacgtttggaagaaaataatttctttcttcgatttattaaccttccaaagcttatatttttcgccatcttgaatctttgaagaaacaagtgcctgagcatcgtcctcgatatccttctttgatagggctattggatttgcaaacttcattttcaggctcgttactttatgatcatcactaggcatgtccatcaaaggcttttgatccttcagcgcctcaatttcctccttggtgaaggctttttgatttgccgtgatccgatagccttctgtcgcttccttattcaagccttcatacgtgatatgatcggccttcatgtcatgctcgacatcatttttaatgacttcatattctttgccggtagcctgccatttttgaaaaaactgatagcctaagaaaatatctaaaatgaggaaggcaacgatgaagattgattttgtcttattccactccactgttagccccctccttcctcaataaatcctttgtaatcggcacaatttttccatttactttcatcgcccaaaccggttccagttcaacgagaggatcatcgttggttgatgttgataccaattgataagcaaggaagatctgatcaattttgtccgtatcataagcggtttgtttcgaaagcagcatcctcacttcgctgccgctcatgagctctgtttcacttgttttaatcggattcgttccgagactgtaattcggccgcttatagctgagaatatcatcattcgcccattgcaccgtaatcgccgatgtcgccccgaaaggtttggtggtgctgttaatgaccgggatctgatccataaagatatagaaactcagctgctggctgtcattgatactgaaaaattgatagtgatccgtccagcttccggtatcctcaaggtatttttggctctttttgattaattcacctgtttgataggatgtgctctgcaccaaattgcgctgttgaaattgcacctgtcgctggcttagattcacatctaaacggctgatcccatctgtcagcacatttctgttgttgtaattcgaatcttctcttacaatgctcggatcactaaacaaagcctgcttaaaggtatttgttttaatcgattctgtgacaaattcttttttgtccatcgtaagcggtttgttcggcagcaagaactctttctttgagccaatggagaacaaactgaacgccggcatatttgattgcctgtttttcaagtcgttcataatgttccggtagtttgctgactcaaccgtcacttcaagaatgagctgtttgctgtaagacaccaaatagattttcttgttcgcttttgtttcattgaacgggatcagaatatggtcaaacgaactgtattcaaacgactgattagaccatttaaacagcgtttggaaaatatcaatcggaatcgtatcgctgaattgcaagtcaagcttggcttcagaaccgcctattccataaaaccagcttttgaatccagccttgtcatactgatccgaaatatctttaattcctttcacatcccaatgtggcaagtcagaccaaatttcttcatagagggcattgtcatccactttgtaatgagcgccgtcatcatggataaacatgtcccttggccttaccgtttcagacagcttttgagtggttttttcgattttatgtttcacacgaacagtagactctgttgaggatgagccttcagaaaagtttggctggaacgtccatatcccccatgtaaaaacaagactgatgacgacgagtaccgtaagtaatatcgtttttatattttcacgcttcatcccaatcatcctcttgttcctctttatatggaagagtaaatgtaatcgtcgtgccttttccttctatgctgtccgcccaaatatctccgccgtgcgcctgtaccatttccttggcaatcgccaatcccagaccggtgccgccaagttttctcgttctcgctttatccaccctgtagaagcggtcaaagactttttcgacatcttttttcggaatgccgatcccttcatccttcacgctgatatagagaagttcttcctcttcattgacatcaatcgagaacgtgacatgtccgccttccggtgaatattttaaagcgttagaaataatattatcgagcacctgcgtaattttatcctggtcgatctcgacgtacagatctctgtccggcagattgcggataaactccacatgctgctcttttgtcatttcaaaacggtcaataataagcgacataaaccggacaatctgaatccattcccggttaaattgataatccttactgtcaaatttcgacagctgaagcagatcattgacaagccggatcatacgctctgtttcattttgtgtcaccattaagaagcgcggagcaatgtctttattttcccacgcgccttcagctaacgcttctaaatagctgcgcattgtcgtaagcggcgtccgcagctcatgtgatacattcgcaacgaattctctgcgttcctgatccattttctcttgttcggttacatcgtaaatgacagcgattaaaccatcaattttgccgtgttccctttgaatcacagagaaattcacgcgaagcaccgttaattcatcatcgcgctcaatttcaagcagcatagaatcctgctgctccactaaatcttcaaaagtataattctcttgaagccccagcaaactcgtaatcggcatttctaaggctgtttcacgtgaaacgttcaacagctccagcgccgggctgtttaagagaataatcgctccatttcggtttgtagcgattacgccgtctgtcatataggcaatgacagaggctagctttctgcgttctccttcagtcatcgcctgggcatcttcaagctctctcgttaagtggttaaacgttgtggccagctgcccaatttcatcatgcccgtactttttaaccttcctcgagaaattccctttcgcaagctccatcgcctgctttcgcatatctgaaagcggatgggtaatggttcttgccagaaaaataccgagaagagccgtcaaaacaagtgccaaacctgtgccggacgccaatatcgtgttgatcgtcttcatttgattaaagacatcttccatactcgcgacaacatagatcgcgccgacaacctcttggttttcagtcatgacgggcttcgcggaaataagaactctgattttgcttttcgggtcataatattttcttaaatacgactgtttggtagaaaaaattcttttgaaaatcagatcggtcgtttgtttccctgccacttcctcaccatacggctttgaagaaccgaccacttcatagcttttatctacaaagctaatttcccgaacctcatcacttttcgtgaagtcattcaaaatacggctgacgtcatcctttatgacggtgctgtcgttatcgctcttatattcttgttcgatataataagaaaggttgtcgattcgctgattcagcgattgttcataagagctgatcagcgacttctctacctgattgacaaaatacacaccaatgatttgcatggcaatgataatcaaaagtacataaatcaaggtaatcttaaattggatcgaccgaaaaaaaccaaccttattcatatggtcattagtcctgttctgggtttctcaagtaataacctacaccgcggcgtgtgacgatccaatttggatggctcgggttgtcctcgattttttcacgaagccggcggactgttacgtcaaccgttctgacatcgccgaagtaatcatagccccaaacggtttgaagcaaatgttcacgagtcatcacttgtccgatatgttttgctaaataatgaagcaattcgaactcacgatgagtcaattcgattgtttcgtctcgttttgatacaacgtacgcgtcagggaagatgacgagagagccgatatgaatctcgttagaggaaggctcttcctccgcaggcgctgttgtcagctggcggcgcaggttcgcttttacacgtgccaagagctcgcgtgtgctgaatggttttgtgacatagtcatcagcaccgatttcaagcccgataaccttgtcaatttctgaatccttagccgtcagcataatgattggcatatcgtatttctttctgacttcacggcatacttcaacgccgtctttattcgggagcataatatctaaaagaattaaatcaggctgaagctcttctaccatttcaacggcttcgtttccgtcgtgggcacagtgcacttcatagccttcttttcttaagttaaattccaatatatctgcaatcggtttttcatcatctactacaaggatctttttatccatcattttgattttcctcctgccgaatgacttcatttcatctatataacattcgtttcatcacttatggcccatgtaaagaatgggtccttgtctattataacggtttaaggtcaaaagataaaaaaaataaaggtttagaaaaaaaacacatgtttcacctttatcgccagttgtttatctattgtcatgctggtcaactttttttaaaaaagataactttattgaaacctcccttcaccggagtgcgtctttatcaatgacgtcttcttctttgaaccggccgcagggccggttctccctttttcttctattataacactcctcatgtttgcctttttcctaaaagaaaaaacgcacctacgattgcagatgcgtttggtaagtggctcgggacggaatcgaaccgccgacacacggattttcagtccgttgctctaccaactgagctaccgagccaaatgttttatttttctctactaagtaaagtaaaatggcggtccggacgggactcgaacccgcgacctcctgcgtgacaggcaggcattctaaccaactgaactaccggaccttacagtaattgcccggagagctgtcgtgtcagctctcacagacaaataaggaatttagcaataacgctaaagtaaatcaatgacccgtacgggattcgaacccgtgttaccgccgtgaaagggcggtgtcttaaccgcttgaccaacgggccttcacgaaatggtgagccatgaaggactcgaaccttcgaccctctgattaaaagtcagatgctctaccaactgagctaatggctcttaaagatgtcggaatttctatagagcaaacgacttagatctagttctcatcttgtactctattgaagcagtttccgtaacaacgagatttataatatcacgaacaaatagaagtggcaataacttttttggttttttttcatatttttttctcagaccaacttatatgcagctttcaaacaaaaaacaagccccttatataggggcttgcagacatattctatttagttcgcacggtacacactgcgaaggacatttgtttgtgagcggtctggaccgacagagaaaatagaaagcggaatgcctgtcagctgagacacacgctcaagataatggcgcgcattctccggaagctcgctcaagctcttcgcacctgtaatatcctcagtccagcccggcatttcttcatataccggctcacattcagcaagtgccttaagacttgctgggaattcttcaatgatttcgcctttatagcggtacgccacacagattttcaacgtttcaattcctgttaggacgtcaattgagttcagagaaagatctgtaattccactcacacggcgggcgtggcggacaacaacgctgtcaaaccagccgacacggcgcgggcggcctgttgttgttccatattcgcgtccgacttcacggatttgatcgccgatttcatctttcagctcagtcgggaaaggaccgtcgccgacacgagtcgtatatgcttttgatacaccgacaacgtgcttgattttggtcgggccgacaccagaaccgatcgtgacaccgccggcaaccgggttagatgacgtaacaaacgggtatgttccttggtcgatatcgagcataaccccttgtgcgccttcaaataatacacggcgcccttcatcaagagcatcgtttaagacaacagatgtatcgcaaacatactttttaatctgctgtccgtactcataatattcgtctaagatatcctcaagtttaaacccttctgtctcgtacattttctcgagaagacggtttttttcttcaagattgcgctcaagcttttccgcaaacgcgtcacggtctaacagatccgcgatgcgaattccgatgcgggctgctttatccatgtaagcagggccgattccttttttcgttgtgccgatcttgttagcccctttacgctcttcttccacttcatccaatttcaaatgatacggcaaaatgacgtgagctctgttgctgattctcaggttatctgtactcacgttgcgctcatgaagatacgcaagctctgtgactaatgctttcggatctacaaccattccgtttccgattacacacgttttatccttatagaaaattccagacgggattaagtgaagcttatatgtgattccgtcaaacttgattgtatgccctgcgttatttccgccttgataacgggcgatcacttctgcattttctgataggaaatctgtaattttaccttttccttcatcgccccattgcgtacctactacaactactgaagacatgtccgtgcacctccgttaacctttcaaaacgattctattcaaacaaatcaagtttatcagtgaagaaacagaaagtcaattgtaaatccgaacattaaattattgtaaatctatattcgttcgctttcattcgttttataagcgttttctcacggttttgtcataaaaagcttgcgaaactttcatcctttagcataagaaagaatcacttgcctgatatcccttttgaattcataaaaacgacccgccagccgtccgggtcctctatcgtcactcccccattgctccagtacgggttctctgattcgacctcttgatagcccatgtgctttagctttgaagtgatcgctgccagttcatctgcattcggcacataaaaaacaagaaggctgtcgggatggggaacgggggcagtgcttccaccttcatactgggtgaattccaaatgataatcggcatgaggaaggccgaacatgacaccgtcatacccgttatgctgtgaaaattctcctattcgtttcaaacacagtccctcttcgtaaaaacgaataatctcatcaagctggcccgtaggacgcgcaattcggatttgtgctgcgtgaaaagacgaaaaacgtttttccatattgttaccatctcctttttgcaccattttattaaaacgctttcagattttcatccgctgagcgaacggtatttcttccatctttcgaatgaaaaaaaccccaagagcagctcttggggcttatgcgccgggcggaactcctgcgtcatcaaaacgccgttccaggttgacgaatttgttgtattcttttacgaacgcaagagacacggttcctaccgggccgttacgctgtttggcgataataatttcgataatatttttattctcggtttctttgtcatagtagtcatcacgataaaggaacgcgacaatatccgcgtcctgctcgatacttcctgattcccggatatcagacatcatcggacgtttatcctgacgctgctcaacacccctggaaagctgagaaagcgcgataacagggacttgcagctccctggcaatcgacttcagttcacgggaaatttcagatacttcctgctgacggttgtcctttgaacgaccgcttccctgaatcaattgcaggtaatcgatcaaaatcatgcccagcccgctttcctgcttcaagcggcggcacttggcacggatttcactcactcgaatacccggtgtatcgtcgatgtaaatcccgctgttcgacaggcttcccattgccatcgtcagcttgccccaatcctcttcggtcaggttacctgtacggagattctgggcattgatatttccctcggcacagagcatacgcataacgagctgctctgcacccatctcaagactgaaaattgctacgctctcatcggtctttgtcgccacgttttgtgcgatgttcagggcaaaggctgttttccctactgacggacgggcagccacaatgatcaagtcgttgcgctggaaacccgcagtcatccggtcaagctccgtaaaccctgttggaattcccgtgatatcaccttttcgattgtgaagctgttcgatattatcataggtctggacaaggacgtccttaatattttggaaggcactcgtgtttttgcgctgtgccacttccataatcgttttttccgcttcactgagtaaatcctcgacctcatcctcacgggtatacccgtcttgagcaatcgttgtcgcagttctgattaatcggcgaagaatcgatttttcctcaacgattttcgcgtaatattctatgttagccgctgtcggcaccgagtttgcgatatctgtcaaatatgaaatgccgcctacttcttccagcaggtctgtgttcgcaagctctgatgttactgtcaccagatcaaccggttcacctcggtcaccgagcaccagcatcgcattatagattttttggtgggacattctatagaaatcatctggaatcaatacttctgaagccagtgttaaagcagacggctgtaaaaaaatagcgcctaacacggcttgttcggcttctatattttgcggaggaagccggtcattcagaaggtctgtcatgctaagcaccgtcctctcattaaaaaatctccaacctccattctaccatttctacagaaaaaaaatagaaaaattgtctgtttcctgtttttttcagttagcagattggatcgtttcggacagtaacaaggcgggaaaaatgcaataaaacatgagggaggaatgaaagatgataaagaaatatgcgattacgcctaatgttgatgcggacggctggtttattgaggtggagaatgtagcgccgacagctttgtatacgtctaaagacgccgctattgaaaaggccaaacaggtggctaaggaaaacagtccgtctaagcttgtaatttatgaccagtttaaaaatgtggaagaagaacactcattttaatgaatgaaagccttcgctgcagcgagggttttttagcggttatcggtttatttcatccattggatgcctatgtgcatcatcaaatctgccgctttttgatacagatcccactccccgatcgaagcaaatttccccatcagctcccgaagctttagcctcactgctatatattcttcgaaagtgacagctttttcagtgtctatttggtgttccttcagcatttgttttaataaagacaacggtgcgtgcataagaaccctccttacctcttttataacggtcattttccgattgctctattcctttgtgacatcttcttacatttcacatctgattcttgtacaatggacagaagagaggagggatcttttgtgagacctttgcaaatttctgctgaaactgcacaaaagcttgcagagtccttgaatctgccgcttgaacagatcatgcatatgcctcagcatattctgcttgccaaaatggctgaactgcaaaaagaggacaaatcatagccttcattcacatacttgcttacctgtttcgggataatatcatgtatatgttagaaaagaggagtaactgctttgccacatccacataataaaaaaatccaatcattttggctgatcaccggcattatctttatcgcctttaacttacggcctgcgatcacttcagtcggtccggtcatcagctctatccgggcagagctgcacatgtccaatggggcagccggttttttgaccgcactgccgctgctttcgtttgcagttctttctccgcttgcacctaagcttggacaacgcctcggaaatgagcgaactttatggctaggtctcgtgatactgcttatcggtgttttgactcgttctaccggctatactgccgctttgtttttcggaacggcacttatcggcgtcgggattgcgattggtaacgtacttttgccaagcttaatcaaacataaataccctgaaaagccagggatcatgatcagcctgtatacgacatcaatgaatatattcgcagctttagcatcgggtgtcagcgttcctttagcgacccagatgaatcgcggatggaaacaagcctttctcttatggggcgggctggctttgcttgcattgctgatctggatacctcagctgcgccatcgagatacggcaaaccagacaatgaagctgcaatccagttccatttgggcttccaaaatggcatggtatgtcaccatctttatgggcctgcaatcgtttttattttacagcagcatcgcttggtttcctgaaattctccgttcacacgggattgatacggcaacagccggatggatggtatcactcatgcaatttgcgagtctgccttccacttttctgacgccagttttagctgaccgtgtgaaacagcagcgcggtatcgttgcggcgctggcctcagtttatctgatcggcctctgcggattattagcgggcggaagccatacattgcttgccatctggatgatcattatcggtatcgggcaaggctccagcattagtctggcgctcactttgattggtctccgcagtgaaaatgcccaacaggccgctgcgctgtcaggcatgtctcagtcattcggctacctgctggcagcagtcgggccaatctttgtcggctatctctttgaccagacgcattcttggacgatgccgattgtgcttctcattgctgccctgatcgtaatgggagcagccggacagggagccggacgagatcgatacatttttcagtctgaaaaaaaaagaaattcagcataaaagcggggaaaatatctccgcttttttctttgaatatttatggtttattcataagtttttcatatttgttttttacaattagacaccataaagaggtgaaaaacgatgaaaaccaaacgattcgacgcagcccttatttttattttgctgggagcagcttttttgaatacgtatcacatttggcaggatgatgcagcgaaccagtactatttggcggctgtaaaaagcatgacgcaaagcttccataatttcttttatgcgtcatttgacccttctggatttgtgacagtagataagcctcctgtcgtgttatggattcaaacgattttcgcactgattttcggtgttcacacgtggagtgtcatcattccccaggctcttgccggagttggatctgtcttccttctctacagaatgattaagccgacttttggagttggagcggcccgcattgccgcacttgtcatggcactgacccctatcgcagtagctgtcagccggacaaacaatattgatagcatgctcgtttttaccatattgctcggttcagcttgcctgtttcgggcagtaaaacaaggcaagctggtttggctgctgatggcatttgccctgattgggctcgcctttaatatgaagatgatgcaagcgtttatggtattgcctgcatttgtgttattctacctggttgcatctcgggtttctctgaagaaaaaaatcgggcccctgcttctgtctcttgtccttctgacaggcctttcactctcatgggcgattgcagtggattcagcctcttcctcaagccggccttatgtaggaagcagccagaccaactcagtgctagaactggcctttggctacaacggcacagagcgtctgcttgggcaaactacgggcctagcaaagggtgatatgaatgctgctggcggagggaacatgcagaatcaagacaacatgcaagcgccaaatggcaacggttcatctttttctcagaacggaaatcaatcattcggaaaccattcacaggcgcctcagccgcctaacggacaaaccggcgctctcaatggaggcggaggcacacctcccacaggtggcaacgggcctggaaatggagggcctggcggcggaaaaagtatgaatatgttcggcaccggtgatcctggcccgcttcgtcttttccaatcagcactttccggccaaatcagctggatgcttccattctcattgatcggattactgggcgcaatcgtcagctggtaccgtgatcgccgcggacatgctgctaaaatgaaagaaacgctattctgggcggcttggcttgttcccgtggctggtttcttcagcatcgcaggattcttccaccagtattatttgattatgctggcaccgccgattgccgccctttctggtatcggatggtatacgatgcaccgcttatacaaaaataataaagactggtccagctatcttctgccggcagccgtcttgatcacagccgtgtttcagatgtatattctgagcgcttatacaagccaaatcggcagtgtatggatgtatgtcctggggctcttaggactgggcatcacccttgcacttctgatgcttaaacgcagccatccgttcagtaagctgctgaccatcatcagcttgtgcgttctgcttctcacaccagtttactggtcagcaacgccgcttctatacggtggtaacagcgtccttcctgaatctggcccgcagctcaaaggctcagcaaacggcgggaacatgttctcttcagaggtcgacagcgggctcctgtcctatctgagaaaacacaataccggcgaagaatacttatttgctactttgacaaccgtaacagctgcgccatacatcatttacgaaaatgaatctgttatggcaatgggcggatttaacggcacggatcccattctgactgtgtcggaactgaaaaaactgatcaaagaaggcaaagtgaaatacttccttctgtcagaaaacaactcaggcaacagcgaacttgtttcctggattaagaaaaacggaaaagaaataacatctgacgagtacagcggttcctccagcagcacgaacagcgtgcagggaatgcgaggaggacctggcggagaaagccagcaaactctttatctcgtggaataaaaaaaagaggcttggatgaatccaagcctcttttctattaagcttcttcttttacatgtacctttaacacagcctgcacttcaggatgcagcttcacaggcacgttcgtatatcctaatgcacgaatcccgtccggcagttcaagcttccgcttatctactttaatgttatggtctttttggagctgttcagtaatttgcttgcttgtcactgaaccaaataaacggccgccctcacctgattttgcgctaagctcaacagtcagtttttctaatgtctctttcaagctcttagcctgctcaagctcggcaatggcttcttttttctctttctgctgttgtccgtttagcgcgctgatgtttgaagcgttcgcttcaaccgcgaggccttttttaattagaaagttatgcgcataaccgtctgctacgtttttgacttcgcctttttttccttttccttttacatcttgtaagaaaataaccttcatctctgtacgcctccctcaaaatactcatctatggcgtgcttcagccgttccagcgcttcagaaactgaaatgccggacaactgagtcgccgcatttgttaaatgccctccgccttccagggcctccatgatgatctgaacatttacctcgccaagcgaccgcgcactgatacaaaccgtttgttcatcccgtctcgccaccgcaaatgaagcctcaacctcactcatcgacagcagtgaatcagcagcctgcgcaatcagcacttgatcgaagtattcctcttcattttcaggaagagaagcaatcgcaatgttatctttatagaggaccgtatgctggatcagcttcgcccgtttaatataggaatcaacggtttctttcaggaacttctgcaccagcaccgtgtcggcgccttttgcccttaaataagaagccgcatcaaaagtccgcgagcccgtgcggagagaaaagctctttgtatccactattataccagctaatagggctgttgcttcaatcatattgatttttaagcgcttcggctgatattcaagcagctctgtcaccaattccgctgtggaagaagcgtatggttccatataaacgagcagcggatctctgataaactcctcacctctgcggtgatggtcgatgaccacgatatgttcaattttattgaccagccgttcctccataacgagtgacggcttatgtgtatcaacgatcacaagcagtgtgtcatcattggaaatttccattgcttcttcaggcgtaataaatcttgaccacagttcttcatattttttgatttccccaatcaaacgctgcacacttgatccgatttgatttgggtcaatcacgataaaaccatctttgttatttgcctgagccacctttaaaatcccgatcgctgcgccgatagaatccatgtcggggaatttatgccccatgataatcacattgctgctttcggtgacgatttcctttaaggcgtgagaaatcacgcgggcccgcacccttgttcgtttctccattgggtttgttttaccgccgtaaaacttcaccttgccgtttggcagcttaatggctacctggtctccgccgcgtcccagtgctaagtccaagctggattgcgccaaatcgccaagttctttcagggaagagactgaagccccgacaccgacgcttaacgtcagcgctacaccgtcaaacgaggttttttcccgcacttcatcaagaatcgaaaacttcgaattttcgagttcagttaagatgtgttcattaagtacagcgataaagcgttctgaagacgtccttttcaagaagatcccgtactcctgcgcccaagcgttcagcaaagatgtcacctggctgttcatcgtgcttctcgtctggtcatccaatccttgtgtcacatcatcatagttatcaaggaaaatatatgccaggacggttctttcgttttcatatagcttttcaatctgaatttgttctgttacatcaaagaaatataacagacgctcatcccgtttgatgacaaccctaaacttgcggtcattcaatgtaaccgtttccgattccacctcttgtttgataagcggcactaccgattcacaagtatcgtaaagtgatctccccactaaagtgctttcattaaagcaagaggaaagaaacggatttgcccattctatataatattggtcattaaaaagcatgattccaatcggcatttccatcaatgcctcttcaccgacttttttcaacctgtaggacaacgtagaaatataagcatcaatctcttgtcgaataagagaatcagcacgcttaataaaaaacaaaataactgccagcagcagcacttcgacggttcctaatatccagttaaaataaaagctgatgaggattgtaataattgacagagcaatcaatgcatagatgggataccgaaacagcggtttttcataaaagcttggcatttctatcactccccaccatgtgagtaaaactcatgttcacttcaccttattccttatatgaaagcccatatctaaaacgcctaaaatgcgaatggctgccatgaagaccggatgcacaaacccaagtatgacagcaatcacagccgcagcctttggatattgtttcttatggcaatagaaaaagataaatgataaaccttggatgaaaatcagaaacccgagtataaactccccatttaaagcgatagagtacagcatttggcctttttctaaaggcaaaaatgaaagcatgacaataatcaaatacagtactacaacactttgcggaaacttcaactctctaaaaggctttagattaggaatatcgggggagaatcgccttaagagcggcttagcgataaggtaactgaggaaagaaaaaataactcctaccatcacaatagctgttggaaaaagatattgaacgatacccaattgttcttccatcagttttaattgcttctcaaactgtccagcattgcccgactgcttcgctacagtttctaccatatcaagagattgccggtattgtgtcatcgcctcatcaatgatattgatacccaaaaactgaatgcttatcacaaaatagaagacaatactaagcatataaataagagcgcccgaaataatggcgtgcccgggctctttccttttgaaaaaatgtcccatggcaatgccggcgcaagctgacataaaagctacaataagcccgttaaaggacccgacaataaaaacaaccggaagactgacagcgcccatccatatccctagcttcaatccatgtctgatcgtatacaagatcattggcagcggcagtgcaaataacagaattgttccaatcacaggaacataaacgaccagaagcgtgatgatcgcaaacagactgattaaaatagcaccttccattaaagctctcgtttgtttcacttagtcacctcgtatcatcctgaacatacgaatagaaaagagcagcataaacgactgctctttttcatcgctgcaacatacgttgcaccgaatgtttttatatcatctctaaattttacttttatattttaacataagtccaaatcgcaagtaaaatgacgctaatgtttcatgtgaaacataaaaaatgaaaagacattctttgaaaagaatgcccatcacaattaatgtttatcatccataaagccagaagattccttgtttttctttttcgtttttctgacatacataaaaattaagatcaccagtaaaagggttgttgcttgcagaacgccgctgctaaacaagaaaaagttctttatcatgtcccacattgtgtttcacctctttgtgcatgttctcaacccgtatcctatataaggtgaatttccctttttataaacttcaaaacatcatgaacaacattgagcgttgggcatatgctgatatggaatctgatcgataaaggagaattttcacatggatgaacgcagaacattggcttggcatgaaacattagaaatgcacgagctggttgcttttcaatcaaacggactcattaaactgaagaaaatgataagagaagtaaaagaccctcagctcagacagctttataacgtgtctattcagagcgttgagcaaaatttgagagagcttcttccgttctttccacaggctccgcacagagaagatgaggaagaagaacgcgcagataacccattttacagcggtgacctgctcggttttgccaaaacatctgtccgcagctatgccatcgcaattacagaaacagcaacacctcaattaagaaacgtactggtcaaacagctgaatgctgccatccagctgcacgcccaagtttatcgatacatgtatcagcatggatattatccgtcttacaacctttctgaactgttgaaaaacgatgtcagaaacgccaacagagccatttcaatgaaataaaacaagcagcaaaggagttccctttgctgctatttctgctgatccttcactaagccgttcgaacgataagattccagcacgtctctgttggattctccccattctttcatttgcaaaacaatcggttcaagcgttcgcccgaattctgtcagagagtactcaaccttgggcggcacctgttgataaacctcacgatgcacgatgccgtccgcttccagctccctcagctgaagagtaagcattctttgagtaatactcgggcagattcgccgaaactcattaaatcgtttcttgccatctatcatgtgataaaaaagaattcctttccactttccgccaatgacatctagagtaaattcaactggacagccttctttgttcgggtatatattcttttttccactcattcttgaccctccaatagtaccttttttgatactacattacattttgcaactaagctacccagtattttacacaccttttctccttagctcaaagaaaatgcttcttattcacatcaatttttaagggtttgcatgattacacctgcagcaagacgtgttaaactatataaagattacactacttaaaaaaaggataggagctatcatggaaaagatacttattttcggacaccaaaacccagacacagatacgatttgttctgcgattgcttatgctgatttgaaaaacaaactcggcttcaatgctgagcctgtccgtctcggacaagtcaacggcgaaacacaatacgcgcttgactatttcaaacaagaaagcccgcgtcttgttgaaacagctgcaaacgaagtaaacggcgttatcctggttgaccataacgaacgccagcaaagcatcaaagacattgaagaggttcaggttttagaggttatcgaccatcaccgcatcgctaactttgaaacagctgagccgctttactatcgtgctgagcctgtaggctgtacggctaccatcttaaacaaaatgtacaaagagaataacgtgaaaatcgagaaagaaattgccggccttatgctgtctgcgatcatttctgattccctgttatttaaatctccaacttgcacagaccaagacgtagcggcagcaaaagagcttgcggagatcgctggcgtagatgctgaagaatacggcttgaacatgctgaaagcaggcgctgatctaagcaaaaaaacagtggaagagctcatttctcttgatgcgaaagaatttacactcggcagcaagaaagtcgaaatcgcacaagtaaacacagtggacattgaagatgtgaaaaaacgccaagctgaattagaagctgtgatctcaaaagttgtggctgagaagaatcttgatctgttccttctcgttatcacagatatcttagaaaatgattcacttgctcttgcaatcggtaacgaagcagcgaaagtggaaaaagcgttcaacgttactttagaaaacaacacagccctcttaaaaggtgttgtttcccgtaaaaaacaagtcgttcctgtcttaacagacgcaatggctgaataagcaaaaagcatcccgcatcgggatgctttttcttattcacccagcttctcaatttgtcccatcacatcagtaatttgctttgcgttttggaccaggtctgactgctccaattctttaagcgataccttgccttcctcggcttgtttcaacacctcttcagcgcttttctgcaaggtttcgttatgctcctgaatggttcgatgaatctccgctgcggcatcaggcggcgttaattcattaaaatcagcggcatccttctgaatcgattcaagctgcgcttcaagtttttctttcgcctcggtgtcatttacagctttctcagccaattcaggcgcttcctctgcaaatgtcttcaccttctccacataccccgctgcttcactcgtatagttcaatccgtcgttcacctgatcaagcatgccgcatccgcctgcactcaaaagtcccactccggcaagtactgtcaaaatgatcttcatcttcagccccctcatcgtttctttttcattttttcttttaagatcggaatcaatttctctttcgctaacggcagccctttcctcaccaattcacgcttcagccactttttcagcttagacattctgatgctcctctccctttttgataaaaatgaaaaaactccaccaatttggtgaagttcctgaaacaaaaagaccttcaccaaatcagatttggcaaaggtctcgctaacaaatgagattgccagcaaagccgaggacaacttgtcccgtaatgacgactttactgtgaaagctactcccctttggagtgttcatttttattactttcattctaaagcaccgatctgttccagtcaaattcctgccgtttatataaaagcgcgctgtggtatttaaaatttgaatggtttttccatcaggagatcatgctatgacagaggaggttttcatcatgagtcaagagcgcgtgaaacggcctgggcataccagatggtacatatcttcgttacttagcggcattattattcttaattattttgaccgagtggccatctcggtagcggcccctgcgatacaagattcgtttcaccttactgcaactgaactcggcatcgtgttttccatttacacctattcctatacactgatgcagctgcctgtcggaagtttgctggaccgttttggggtcgcatgggtcacgagggttggaatgacaatatggagctttttaacgatccttcttgcttttttgcaaggaaaattgctgttgtatctgttccggtttctcattgggctgacgagcgcctctgcgttccctgctgcctctaaagcaaccgctctctggtttcctccaagtgagcggggattggcaaactcactgttcgattcggccgccaagttttcaaatgtaatcggcgcgccattggtcgcctttcttgtcacaacatttgactggcgtgtcgcttttttgacgattggatgcatcaatgtgctgtttacgatctttttctggcagtattatgaacagcctgaacggcacaaacgtatttctaaaagtgaactaaactatattcaaaaacacaatgccattacaacagagcaaatcccttacaaaacgggcccgcttttaaaaaagcttttcaccaatcggaaagtatggggcttaatgatcggatttacagggtacgggtatacattcaacctgctgctcacctggcttccgactttctttaaacatacatacggtatggatctcatgtcgtccggtttatttacggcagtgccgtggctgatctcaaccatttccggaattgccgtcggcggctggctcgtcgattattttattaagaaaggctatcctaacaccaaggtgtaccgaaccgtaatcatagtcggaatgagctttggctttttctttttaggctccattctgacgaacaatattaccgtagccattatttgcatttccatcggactcgccggaatttcagcaaccgctccggtcggctggtccatctccgcagaactcgcgccgatcggttccgtatccatgctgagctccatggtgaatctcgcaaacaacctgttcggaggcattattgctgcgtcactgacagggtatttgtttgatgtgacaggctcctttacactcagctttctggtagctggttttgtgctgttgctgggattggttttttatgtgtttgtattaggggatgtaaaacgaattaaactggaatgaagagtgcttgctgaaaagcactcttttctttgaatccgccaggtgttattttctttctcccaacattcactaggctgtcttcggacgaaaacaccaccattttatccttgactccaaccaaaggtaaggcctcatagtgaaagaagaaaggaggagtcagatggtgaaattaacagtaaaagaactatccaatattgcgaatgtcacaatcaaaacgctttatcattaccacaaaatcggcttgctagccccaaaggaaataagcgaagccggatatcggtactatggtgctgaagaactaaaaagactgcaggaaatccttttttacaaagaattagatattcctttgtcagaaatcaaaacattactaaaagaggatgctgaaagaacaagtacattagaaaaacaaaaaaagctgtttgaaaagaaaattgaaaagtatcagcgtctcattcaaacagtcaacacatctttagaatacacgagaaaaggcgaaaacatggatcataaggtaatgtttaaaggatttgaaagcgctgaagaatggaaacaatctttagcagaacaaaatgggtatttaaaagagcgttacgattttgaattggatacacatacaatcaatgtcgatgaaatgaacaaaatggcaatagaggctaaacattttcttgataggatggctgattttttaagaaacggtgtaacgtatcatgacccttccgtgcaagagcatgtcatgaatcatcttaagttcctaaatcagaacgggcatccgacaagtaaagaagattacgtaaaacaaacacgtttttttatgcaagatgatttccatagaggaatgttagaagagcagcaaaccggtttatcttattatttggttgtcgttgcagaacacctgtagtgttttgtcaccctttatagggtgacagccatcaggattacgagacagcaccgccaacaatcgaaacattctgccggtcaacggcaaaacgccgtccgttccattttaatacggtttgaacatatcccaatgagtcggcgttataccttcccgctatccgctggtacgccaataattcgtatacgccgtctctgtcaaaatcaaccggatacaaacccgataaaggattcacccatccttctatcggcatttttaacacaccttggctgttataaatctcattcaaatattccctgcctttgtaagtaaggtcgaggatatacgtttcgttttgctgatgactgatgacgctcgctttatattgattttgatacctcacactgtactttaattcatcattcaatacatctgaattgaaaattcgccggaactgcctgtttagataggcaaacacgtatgcataaatagcaccgccgcttccccctgtatctattaccaccgccacatcctcaatcttgtcgcctgtcatatcccccagaaaaagtgacggattgtatcccatattgttttgaagctgaatctgctgctcctgatgggttctgccatcacagatcaccaatgtgatatttctccataacaggctgccgggcatttgatttccagttagaaagacctcatcaataacgccgtctcccgttacatcgccgcgagtagatgcaatgattgcacgtgaggagacaggctgccgaaatacgtatggatgttgaacaagtcctctgctttcataaaaccaataaggagccattctgatgtcatacacattcaattgtgtcaccttccctaatcagctgaatgaatcattatatgcaggaatggcacatcaaagacatatcttacacaccaattaaatccgtaccataagagttatcgattacacaaagccactcgccttgcgcattcttcttaaatacataggtcgcccttctttccatcgcatactcggagtcctttttatccgaatcaagcagtgtctgagaaaggacgagtaccgtgtcacctgcttctaacaggatcatttccccttgtttcgggacaatatgatgattgaaatagttcacaatcgtaataaacgcttttttgatttcttctttgcctcgcgcgatcatgcccggcttcacgactaaaacggcatcttccgaataataattcatcagtgtatcaaaatcttcattttggattgccaaatcacacgcagagatgatgtctttcaattgctgttccaaatgaattcccccaatcatcatgattggatatattatacatcgctagaccactgaaaccttgaaaacaaaatgaaaagtatccttttttcctatataatcaaatagatatatttaacaaagtacccaagtgaaggggtgaacattattgtctgcggaagtaacgttacatgacaatatacattatgatttaagtgcggattgccagcactgttttggcctgtgctgtgtcgccttgccttatgcgaagtcggcagattttgcttttgataaagacgggggcacgccttgccgcaacttacaatcaaactatcaatgttctatacataaagatctcagagaaaaaggatttcgaggctgctctgcatatgaatgctttggcgccggccaaaaagtatcccaaatcacttatgagggaaaggattggcgaaacagccccgaaacggccaaccagatgtttgacgtttttcctatcatgcagcagctgcacgaaatgctctggtatttacatgaagctctttctatagatatagccaagccgattcatcctgaactgagaaccagtttcgaaaaaatagaaaggctcaccaggctcagcaaagaacgcttgctgacactgcaggtggacgagcatcgagctgaggtcaatgaatggctgttaaaaacgagtgaactggtgcgtgcccaagcccgccatccaaaactcccgaaaaaggtcagccggggaagtgtcctgatcggcgcgaaactgaaagggcttgatctgcgaggagcaaatctaagaggggcgctgctcatagccgccgatctgagatttgccgatttgagaatgacagactttatcggtgcagatatgagagacgctgatctcagcggcgccgacctgaccgggagcatctttctgacacaggcacaggtgaacgccgccaacggcgattcgaaaacaaagctgccgctgtctgtacgaacccctgcccattggaaataaaaaaggacccgctaacggtccttttttactgatcaattcaatcctttttcgttccttttatccggcattttcacacttcttgccaagtatcccgacagccataacgcaaccagcagcatgaaggtgatcataccgacgacgcccagccagtgaaaagcagaccagaatagccctccgactgttccgcaaacacttgaaccggcgtaataaaagaacaaatacagcgatgaagcctgtgctttgttatgaagggctctcctgcccacccaactgctggcaactgaatgtccgccgaaaaaaccgaatgtaaagagggcaatccccagaattttcactgccagcatactgtttatcgtgaataaagcacctgcaatgacgatgaaaatattcatcaccagtatttttggatagccatatcgatcaaccattcttccaatgaaagacgagctgaaaatgcctacaatcatcacaataaatatccagctggcaaatgctttattaagcgaatacggcgggcccaacagcacatacacaatgtaattaaacaaggcaacattgcttccgagcagcaaaaaaccaatgagaaacaaactgaatagttttcggtccttcaagtggccaatcagagacattcccaatttcccgagcttcaattttcttggcgtaaaatgcctggatggcggcaaatttataaaaaatataacactagcaatcaaactaatgacaccaattgatcccatcgccatatgccaattcaagtactcgctcaggagcccggaaacgatccttccgaaaacggcgccgattgcatttccgctgatatacagccccatcgccgacccaagacttccgggttcaatttcttccccgagataagccatcgcaatcgacggaaggcctgcgagcgcaacgccttgaatggttctcaatacgagcagcgtatgaaagtttggactaaaggccgatgccagacagagaaccgatgcggccagcatggaaatacccataatcggcttgcgcccccacacctcggataatgaaccaaagacaagcatgctcacagctaacagcattgtggtaacagataaagaaagactcgccgcagtaggcgttacatgaaattcccgcgtgaattcctccatgagcggctgtacgcaatatagaatcgcaaatgtattgaaacccgcagcgaagaaagcaaacgtaatttttcgaaaaaccggtgtgcctttttgaatgtatgtcatcgggactttatcggtccctcatcatgttgtggagcactgccattcataaacaaccatcctttatttcttccgaattcaaacatcctcgagtctgtttatattactatcttagcaccgttgatatatgttgtataatgcatataaaatatcattttcatgcttatatgtaataaaggagggatgataattggaatgggaacaacttgaatattttcaaacactggcccggatgcagcacgtcacgaaagccgcaaaaagcctctccatcacacagcctgcgctttcacgctctatcgccaggctggaaaatcatttgggcgtcccgctatttgacaggcaaggacgatccatcagcttaaatcaatacggacacatttttttgcggcgggttcaggcgatgatgaaggagtacaccgaaggaaaagaagaaatccaagccttattaaagccagaccaaggcgtagtctctctcggttttttacatacattaggcaccacgctcgtgcccgatctcatcggctcctttcagcaggaataccccaacattgccttccagctgaagcaaaaccactcttattggctgcttgaacgattaaaatccggagatctggacctctgtctcctcgcttcgattaagcctgaaaatccgatccaatggatcaagctgtggagtgaagaactctttgtatttgtgccaaatgatcatccattagccagtcgcgaaagcattaccctgaatgagattgccggggagcgttttattttattgaaaaagggctatgcgcttcggatgacggtcgatgagctgtttgagaaggccgatatacagccgaacattatgtttgaaggagaagaagcagctactgccgcaggttttgtggcagccggactgggcatatctattctcccagacctgaaaggcttagaccaaagcaaaatcaccaaaatccgcgtcagctggccggaatgtcagcgtgtcataggaattgcctggataaaaggcaggtttttatcaccggttgctgagacctttaaacaatatgtgatcagccatttttctgagtagggaggattcaaacatgaatgtcaaaaaaatcacgtcagaacaggatttacatacagcgtttgaaatcagaaaggcagtatttgtagaggaacaaggctgtcccatttcggatgaattcgatgagttcgatacactccacggtgactgccagcacatcctagcttatcatcagaatgtacctgttggcactgcacgtgtccgtatcgttggccacgcggggaaactggaacgaatctgcattctgaagtcttaccgcaaattcggtttgggaaaagtgatcgtcgatgcattagaacgtattgtgaaagaacaaggcatttctgccttcaaactgcacggccagacacaggcggcaggcttttatgaaaagctcggctatcagactgcatcagaagaatttatgctggacggcattccgcatgtactgatgacaaaacaagacgattctgctttatagattgttcacaaatttgtcacttatgagcatgaacagttcattggtatactaatcaccgattatggagagaaggaatgattgtatgccagcaaataaaaaagagggtcttatatttggcgtgatgatgtgttttggaatggtctgcgtcatgtcgatttacaatgccatcatcaacggagccattcaggatttttcactggtgaccgtttttgaaatggccatcggttttatggtcgccctcctgttcgatttactgttagtgggccccctcgccaagaagattgcattccgcatgccgttcgacaagactaaaaaaatttatgtcatccttgccatgtcaacttgtatggtgattggcatggtactttgtatgtctgtgttcggtttagtgacagcggttctggcaaatgggctgaacggggacagcctcttcagtgcttaccttatgatggtgttgaaaaatttcatcctggcctatccattgcaattactgattatgggcccattagtcagagggattttcatgaaatttgtaaaaccaaagctcaaaactgcaatttaaatagaaaaggagtgagcctgacactcactccttttgctcatgaatcgaatgtaaaacaagctccgcaaaagcctctgcggcaggcagctgccattttttctttttgagtaaatcggatcaaggactgcaccatgctgaagaactttcagcttatgtttttcacttccattaatccctataccttaccaaatagtttttatacaattcttcgttataaagaatttcttcgccatgtgaagagcaaatgagcgttggtttgatttgatctatgattgagccgctatcgatgttctcatttatatcaacactgaatcttcttataggtgggtgtaaatcctccttacttgtgataaaaaggtcgcccgttaatagcgtacgatcgattttatgatcatacacgacatgccccggcgaatggccaggtgttaaatagtatttcagaggcaggtgagcaagcgtttgctccgtcagcggctggacaatatgggctacccctgtgttctccacttcatttttgttcggatatggctcttccccattgatgtattttagttctttctggtgcgcaaaaatcggaatatcaaatctcactaaccattttgatgcacctccgatatgatcactgtggccatgggtaagcaaaatggcttttggattgccgatcgctaacgctgccctaatttgagcatcagcaaaacgttctattcccgtatcaacaatatatacatcatcaccatctttgataaaccaggtatgaaccggaatccgaagaggcacatcaagctcaaattcacattgatagacatgctctgataattgtctcaagttcacgcaaaccactccctttggagatttttgatagtttaaaagaaaaatagaagtgaacggactattttcaaggcagattatcttgaaaatggtcccacactccagcggaccggtattcttgaggaggagacgccgattttcgccagcatcagctcgacttgttaacattgtccattaataatccctcttgttccccttcttcacatactcccaatcacgttctatattcttcctcactctatgaaggagtgcagaaatggtttccttttcctctgaagtaaaaccggacaaggccacttccgtggaatgttctccttctcttcttaacaatggatatacctttttccctttctcagtcgggaacagtttttttatttttttattttgctcatctggcagtttttgaataaatccctgcatttccagcttcttaatggcccgcgcggccgttgtccggtccacctttatcatttccgccaatttttcttgaataattcctggattctcgtatatacgtacgagatagaggtactgccctcttgttaagtccaaatctttaaattcgatgttgcttatggaatccaacgctcttgctatcatgccgatctcacgcaaaatatcattcattcctaaaacccctcacgtatttttgttgcaattacaacaaaaatgttttaaccttactattataagaccacatgcgtgctgtacagtccagactaatatcagaaaaggattgattcataatgaatataaaaagaataacaactgaagctgatttacatgaagctttgaatattagaaagacggttttcattgaggagcaacatgtatcggaatccgaagagttcgatgaatttgatacgctccaggaacaatgccagcatgtcttggtatatcatgagaatcagcctgtcggcacgggccgtgtgcgcatcgttgaccatacagcaaagctggaaagaatctgcatcctaaaaccttaccgtaagtatggattgggaaaagtcatcgtaagcgggttagaagaaatcataaaagaaaaaggactgactgcatgtaagctgcatggtcaaacacaagcagcaggcttttatcaaaaactgggctaccagatttcttcacaggaatttatggaagacggcatccctcacgtcctgatgacaaaagacatatcgcggatttaacatgaaatatattttttacggattaggaatacttatattaagtttgggcatttccttaaccatacaatcaggactgggcacatcacccttcgatgcccttttggtgggtctgtcaaaagaaatcggtcttaccgtaggaagctgggaggtccttatttctgtgatcctcttaatctgcaacgctatattaacgagaaaaaaacctattttgctgggcttgattacagcattcattactggaataggcattgacctatggttgtttgttgtaaaaaacaccctctatctaaacgcgttgttaagcaaactgatttgtttcggaattggtttggtgctcatcggtcttggaacagccatctatcttcagacgaaattcgcatcaacgcccatcgatcatttaacacttattatccgagatctctccaaaagaacaatcttgttttcaagaacattggtatacgctcttttcttagtattagccatcatctttaaaggccctatcggcatcggaaccctattaaccgtctgtttgggaggaatgatccttcacgtttttatgcctattgtggaaaaacaattcttatcaaaaaaaagaaggggttaaaaaacctcttctttgaaaaaacgaaacgcaaaacaagctacgtttcgttcaataattttatgataaattaaaatttatagtaccaaaaaatcgcaatttcatttgctgttggaaggttggaataaagcatcgtatcaactgcacctattataaagtgatgtttggcataaaaacgacaagctgaaacattaatatcttgtgtttcaagcataagaccaaaaaagcgattctcctttgcccactcaatcgctttatgtaataatgctgttccaacgcctttttgtctatagtcttttgcaacggcaatgtcctctattagtgcatacccattccagttagaacgaatcttaatccggccgatgcagttgttttcaacataatataaaaaaaccgcttttccctcttcttcaacataactaacatccatttcatcatcttcatattgtttaaaataaggtttagaaaatcgttcctcagtatatgtccaaacaccgttttcaaaagcaggtatcattctcccaaaaacaacgaaaggttcatttggtttattgaaatctttcaaattcatttgagtcattttcttgatcatatcaatcccctcctaaacgagattatattagcatactcgtttcgatcgataacagcttccaaaagggcactctttaaaagaacagcatccattaccttttatataagcgatttttctatttcactgtcttaatggggtatttcaacagaggcttgtggtacagtaaaaaggaatagaaacaagagaaaagaagatgaacctatgcccactaacaataaactcaatgagaaatatcatacttccttcaactcgcccacaaccctgttgactagtatccgtggagagaggaagctttgacacagcttctgccattgatgacatctctattgaagtatccaaaggacaaccaaggatcgctatttgactttttcaagaagaaagtagagtgaataaaggagtgattgagtatgttaacaagagaagatatctttaaacacgtcaaagaaaaatacggtacatcgcctgattacccgtgggagaaatacccaaactatgcttctttgagacatacatcaaacaaaaaatggtacggtcttatcatgaatgttctcccagaaaaattaggcttggatggtcatggcgaaatagatattctaaatctaaaatgtccccctgacataagtgatagcttaagaaacggggaaaatatcttacccggatatcatatggataaggaacattggatttcaattgttttagaacggacagatccagaaggcgaaatctataacttaatcgagcagagctttcatttaaccaagtgaagataaagagtgttccggctaatcaagctgcgaagagtagtgggcactttcattttaggatactgttcttcactcagtccataaacgcaacttagtctatctggtgcgagagtgggagaagaatttctaccaacttcttatggaaaaggatgaatagttatgacaaataacttaaaacagagaagaatcattttagatttagcagttactttagatggttttattgaagggaaaaatggagaagttgattggtgcattatggaccctgatatggggtttactgatttcttaaatcaaattgatactattttatatggcagaaaaagctacgatttatggggacaatatattccaaaagatgaagaccctgatacagaaaaggaaatttgggaattggttcatagtaaaaagaaatatgttttttccagaacacaaaatgagattgataatcaagccatatttataaatgataatattcttgaagaaggaaataaattgaagaaaaagtctggcaaagacatctggctatatggtggagcgagtctcattacaacttttataaatttggggcttgttgatgaatttagattatctattcaccctgttgttttgggagaaggaaaaccgttgtttattgatgtaaaacagaggataaatttaaaaatggtgaatacaagaacattttcctctggcgttgtgcaaatcgtttatcattggaatggctaacattgtaaagtaacactcgacagtaatccttcttattgaactaaaggggaatccataaataatgggttccccttaatatactatggaactatcaatatcaaattttctgtaataaaagaggattgaaaaggacggtgtctcctccattaacatcattaagcattatagtatattttcttctccctcttttaagtaaatcggctaagttttgtgtttataaaaaaacgaaagaaggtgatcctatgcccaataacaataaatccaatagattaatcgctgagaagtctacttattttacttcaacatgctcataaccctgtggactggttcccttggggagaagaagcatatgaaaaagcgaaacgcgaaaacaagcctgttctcgtatctattgggtatagctaacgatggctaatctaaagaacatgctattgatgccatgtttattcattttacaaaaaaggatcaaccttgaattactttcacaagattgatcctttcactcatttagccatgtctccgcgaacgtttatatacattcaagattactagccaacaaataacaatgattcctgcaaaaagtatgagcatattgctatacaaataggtagagtgatcaacgtcaataggcagcagcctatgatctaggaagccgatagataataaaccgcctacaatcgcaatacccgttccctctgataaaaagctcgtgaaattaagcaaactcattccagcgcccgcttccttttctttcaaactgctagacacaactgtagatataactgtttttgtgaaagatagccccccaaaaacaaaaattactataattgtcatgatccatggtgctgcatctataaaaaaggcagcgattaaaaagccggaagaaagcaatgcacttccaatagttagtacatacaaggaacctttccgatcaacaagcaatcccccaatgtaaccaaagatgatgacactcattgttccggggaaaataatgccgcttccaattgctgcagtacttaaatggtgaacatctttcatcatgtaaggaaccatagagacaaatcctgctactgtaccaaatattagtcctccgcaaagggttccaatcacaaaaaagacgtttttccctaattcagggtcaacaaaagggtcctgagctttcctaatgtgttgcacaaatatgaagaaagcaaggatactgatgatcagaaaagaaaatctataagatgttgtaaacagcataaaaaatacgatacctgcagacatcaatataatccctgccatatcaatgtgtcctcttattctctcttcctttttcaacaattttataaggaatggaacggtgataattgttgcagttggaataagcagcaaatacgaccaatggatataatgagcaaccattccgccaatagctggcccaacaccttctcccattgctaccagggacccgatcaggccaaatgctttccccctgttctcttttggaatatagcgcgcaacgacaaccatcacaagagctgggaatgcggctgcaccaattccttgaataaatcgggctagaatgagaataggaaagaaagagtgtccaacaaatccaatgatcgaccctaagccatttaccataatcccaaatagaagcagatttttgatgcccagctggtctgatagctttccatatagagctgttccaatggagaaggttaacataaaggctgtattcacccagtttgcacttgctggcagtttattaaactcgttggcaatatcaggtaatgagacgttcagaaccatttcatttaatacgctgaaaaatgatagaacacaaagccaaatcaaaacttgattgtgccgtaaagttgactgtgaataagacgtattcacaatttcccctccattaatgagggcagacgcagtttatagggtcattgatacgcttccctcttttaattgtaccctgttcattttattgcacttcataataactccccctacatttgattgatatgatcttattatatatagactaaggattaaacttttactttttttataaaaatttgaccagattgcgaaacaaggaaaaacgttattcgcatttatctcaagtggcaaaatgaaacattagtttatattttcacatcacaattatcgataagcagtcagttattgtatttgtttaggataactgtggtaacctgaatataaccaacttaggaagaaggtgatcccatgccaaataaaagtaaacccaatagattaatcgctgaaaagtctccttatttactccaacacgcccacaaccctgtggactggttcccgtggggagaagaagcatttgcaaaagcaaaacgcgaaaacaagccggttctggtcagcatcggttattcgacgacttgtcattggtggcctaggataatcaaatcgtgtggaactccattaaaagataacagaagccattttaaacgataatactatttgttcaaacaatacagtctaccttttatttcattcattttctaaaacctgtaatccgtaaccacgcggtagcaggtttttttatttgcttgacttagagttaactctaaattgtaaactaactttaattaaatgagagggatgatgttgttgtattccattagtaaagctgctgagaagactagtattagttcgtatacattaagatattacgaaaagattgggttacttccaccaccaaaacgaaaaaacagtggaaggcgtttttatacggagactgatattcagttcatgttattcctgaaaagtttaaaggaaacaggtatgtctttggaggatattaatgagtttgtcaaagacggatgcattttggaaaaaatcaattcggatgttaaatcggcacaactctccccatctataaataaacgtattgagattttaaccaagcacttagagaaaatggaaattaaaaaaagggagctggaagaagtgatttctactacaaaaggaaaactggatacatatttttcaattttgaaagaggaagtggaaaacaaatgaaacatttaaatatatacataatgttacttggcttctctattttcacgggagctacttttaatcttgcaaaatatacagttggatatttttctccatcgtcttctgcggcatggcgtttcggtttagcggctgcagtgatgctcatcattttgatttttactgaaggtataaagaagagtcaattacggaaaaacgccgtttcatacattattcttggaattataggaatctttggatttaatgccttgttttttgttggtttaaaatatacatctcccgttaacggagcattaataatggggctgaatcctttattaacagcaattctcgctcgaattatcttaaaggacaacatgacaaaaaaacaagtactcggcatattctttgcattcatcggtgtattgttagtcattacacaaggttctatcgaaaccattaaaaccttatcaatttcaggaggagacttaataatctttacaggtaacgtttgttgggcactttatggcgtacttggacgtcggtttgtaaaggatggtacaccgctatctacaaccacttatacgatggttattggtgctgttagtttaatagtagtttccttatttacatccaaacctgtttctttatcgaacatcccgattggagtttggggggcaattgcttttatggctttctttacaagtgttttgggttacctatggtggaatcaggggattaaagagattggggctagtaaaacatctttatttttcaaccttgttcccgttgtaacgatgattatttcatttgccgttggaacaccaataaaggtatttcaagttattggggctgtgctagttatattaggcgttttaaccgcttcgggggtaatacgtattcctaagtacaatactaaagaacagtcagctatataaagaaatagggagtatttttgagaaaatgtgttaagttaaatatacactaattataggaagaaggtgatcccatgccaaacaaaagtaaacccaatagattaatcaatgagaaatcaccatatttactccaacacgcccacaaccctgtggactggttcccgtggggagaagaagcttttgaaaaagcaaaacgcgaaaacaagccggttctggtcagcatcggttattcgacttgtcattggtgccacgttatggctcacgaaagctttgaagacgaagaaatcgcgcgtcttctcaatgaacggtttgtggcgattaaagtcgaccgggaagagcggccggatgtggattctgtttatatgagaatctgccagctgatgaccgggcagggcggctggccgctgaatgtgtttatcacgcctgatcagaagccgttttacgcgggtacatattttccaaagacgagcaaattcaatcgtcccggttttgttgatgtgcttgagcatctgtctgagacgtttgcgaacgaccgtgagcatgtcgaggatattgcggagaacgccgctaaacatttgcagaccaaaacagccgccaaatcaggcgaaggccttagcgagtcagcgatttcccggacattccagcagcttgccagcgggtttgatacgatctacggcggtttcgggcaggcaccgaaatttccgatgccccatatgctgatgtatttgcttcgttatcatcacaatacggggcaggataacgctttatacaacgtgacgaaaacgctggacagcatggcgaatggcggcatttacgatcatatcggctatgggttcgcccgctattcgaccgatgacgagtggctcgttccccactttgaaaaaatgctgtacgacaatgcgctgctgctgactgcttatacagaagcctatcaggtcacgcaaaacagccgctataaagagatttgtgaacagatcattacgttcattcagagggaaatgactcatgaagacggaagctttttctctgctttagacgcggatacagaaggagaagaaggaaagtactacgtgtggtcaaaggaagaaattctgaaaacgctcggggacgatctcggaacgctgtattgccaagtgtatgacatcactgaagaaggaaactttgaaggcaaaaatattcctaacctcattcacacaaagtgggaacaaatcaaagccgatgccgggttaaccgaaaaagagctcagtctcaaactcgaagacgcaagacagcagctcttgaagacacgcgaggaaagaacctatccgcatgtcgatgataaagtgctcacctcatggaacgcgctgatgatcgcgggtcttgcgaaagcggcaaaggtataccaggagccgaaatatctcagcctagcgaaagacgccatcacatttattgaaaacaaattaatcatcgacggccgtgtgatggtccgatatcgtgatggcgaagtgaaaaacaaaggctttatcgacgattacgcttttctcctatgggcttatctggatctctatgaagcttcgtttgatctatcttttttacaaaaagcgaagaaactgacagacgatatgatcagcttattttgggatgaggagcatggcggattctacttcaccggacacgatgctgaggccttaatcgtccgggaaaaagaagtgtacgacggcgccgtgccttcaggaaacagtgtggcagctgttcagctgctgcgtcttggacaagtcacaggcgacttatcactgatcgaaaaagcggaaacaatgttttccgtgttcaagccagacatcgacgcgtatccgagcggccatgctttctttatgcaaagtgtgttaaggcatctgatgcctaaaaaagaaatcgtgatttttggaagtgcagacgatccagccagaaaacaaatcataacggagcttcaaaaagcctttaagcctaacgactccattctggtggcagagcagcccgagcaatgcaaagacattgcgccatttgcagcagactaccgcatcatagacggcaaaacaaccgtgtatatttgtgaaaacttcgcctgccagcagccgacaacgaatatcgaagaagccatccaaacgttaataagcagcagggattaagacccttgctgcttactttttgatttcttatggtaccataaagcgatccccgcaaacacaagattgaccgctatcgtaaagaaagcctcccacatcgggttcccccgcgtaaccgtaaagagagaaggaattcctccatacacactgtttttttctgtaataaacatacacaaaaacatattattcgcggcatgggcgccaagtgatatttcgatgcttccagttttaatcgtgtaataggtccacacaaaaccaaatgttaaatactcaattcctgcccagacagcgccattgttcatttctggattcgcaaaatgcaatacgccaaacaatcctccgacaatcagtgtcaaaaatagaggatttttcgtcaatctcccgaaagcttgaagcaaaaatcccctgaaaaacagttcctcagctgatgtctgaatcggaaccaaaatgagggcagccgctagcagccagataaagcgtgaggcattaaactcttgcattgaatagctatcaggatgaatcgcaaaatcaatcaattgtacggcgatcatcagcaagaaataagcaataaagccaaaggaaattctccgccaattcatctttgaatttggtgtaatcacagttcggaaaggccgcttcaaaataaagcgcacagccagccaaactcccggaatggcgaataaataaatcacatgggacaaataaagatctacgaggggatcactcagcacagcttcatccaaatcaaacgtgatattgggattcacaataaccgtgaacagtatagcgaaaaggtaagctatattcccgaatacatataaccctaccatcaccaaaaaagcgaaaaaatatctccacaacgtattgtttccttctataggacggataaatgaattcattccttctatgtctcttcctttcaatgagaatattactatatatttgcataaattggtctatgaatctactgttttggaaatcttttaagcaaaattaaaatataaagtgtgaatttagttcttccatctagtgatttgaactctgttgccaatgaaccaagatacttataatagtcctaagaggggaattttcagtcttttcttactactcaaaagggggttttttatgaatacgatcttcaaacaaaagaatacacatcctttctcaaacgcagcgaatcgtttagaccgccttccgatttcacgcgttcatttccaagtgttaaccgctctcggcattgtttatttctttgatctcgcagatttatttaccctcagcaatgtagcgccggcactgatcgagcattggggcatcccgctttcaactattgctaacgtaacggctgcttcgtttttaggcatgtttttaggcgcttcactgggcggacggctgtccgatcgaatcggccgcaaaaaagccttaaatctatttgtctttgttttttcaatcgcatcgctatgcaatgctgcggcatgggacattccatctttaatgacattccgttttctcaccggatttggcgttgcagccgccatggtcattacgaatagctatttggcggaatttttcccttcaagtgtacgtggaaaatatatttctttttgtgccatgattggattgatcggggttccgatcaccaacattgtgtctgcctttgtcattcctcttggttcatggggatggaggctagtatttgtatggggtgccgtcggccttatttattttttctttattcgacggctggaagagtcgcctcgctggcacgaaaatcgcggggaatatgcgaaagccgatgcgatcctcaaccgaattgaggcacaggttgaaaaggagaaaggcccgcttccggcagcatcccagcctaaagtaagcgaaactgttaagcagcatgcaggttacgccggcttattgaaaggcagaaacctcaaaatcaccatcgtattatctgctgtatggatttttgaaacgtttgggttttacggatttgcctcatgggttccaagcctgttaaaaagcaatggtgtcaccatggaaaatacattgtggtataacgtattgcattccgtcggcgctccgcttggcgcactgctcggctccatgatttctgaaagatttcaaagaaaatggattttagctgcgagtgcgtttctgacggccatcgccgggctcttatatggtatgacttttattcccatcatgatcattgtctttggttttatcgtgaatatcacagaacgggtctttacctcgaacttatacgcctatacatctgaaccttatccgactgaataccgctcgtctggcagcggtttagcctatggtcttggccgtttttcaaacatttttggctcattgcttgtcggatttattgccgttcagctcggctatatcagcgtcttcttatttattgggggctgctggctcgcatgctccttgctgttaatcttcttcggtcctaatacgaatgcgaaacagatttaaaaaagtcagtgcggatctgccgcactgatctcattacaattgcttcaaaatcctcgcggggtttccgcctacaacagtattagcgggtacatccttagtgacaacagatccagaagcaatcactgcgttatcaccgattgtcactcccgggttaatcaccgcccggcctccaatccaaacttgatctccaattgtcacaggcttaccgaactccttcccggatttcctttcgatcggatcaagaggatgaccggccgtgtagatatgtacacctggcgcaatcaaacaatgacggccgatacgcacctcacacacatctaaaatgacacagtcaaaattaacaaatgtatgatctccgatatgaatgtgatagccataatcacagcggaatgtcggcaaaatcgtgacttgatccccaaccgaaccgagcagctccttcaaaagctctgtccgcactatatcatcttccggtgtttcgttatattgtctaatcagctgtctcgcatgcttgcgttctagtaatagttgttgatcttccgaattgtataattctccggctgccattttttctttttctgtcctcagcatttaagtcactccatgtcagattgtaatctcgatcaaatttccttcatcatcctcaatcacactttcatagtagccgtctcctgttgtccgcgggccgttgacgacggcaaaaccatccgccttcaaccgagcagtcagttcatccactttctcccggctcccaacggaaaaggcaatatgtgcccagcctgtcattgtttgtgagggcggatcggtcacatttccttttttcataatctccagccttgctccggaaccaaacgtaataaaataagacttaaaatcttttttctcattatgatacaaatcattcgcttcgccattaaaatacgattcataaaaagacttcattcgctctaaatcattgacccagaccgctgtatgttcaatctgcatttcttcctcctccttcgccttcaatgaagttataaggtatgaaatgcatttcagttcaagcttttttcttaaatttatgctgaattttgatatcagcgggttcatcctgcaaaaatagagaaaatgctgcgatgccgagctgctcaagattcaaatcaagcgacggaaaaccaagaacacggctgatagaagtatttccctcgcctatgatttcaacatcccaattactctttttggcaaatagatgaattccagctgccacttcatcactatttgcataaatagcagtcggaaccctcccgctcatataaaaatgttcagctgcccgctcaccatcattcatatcgttgcatccggacagcatatggcggtcttccaaccttccgcagacagctttataggccgcagctttatcagccgtgctcgggctcctatcagcttctctgacacacgtaaaagcaatattctcatgcccgcggccctttaaatagcgaaagctctctgcataagcagcttttctgtcattaaaagcacaaggaacatcaatgtctccggtatcctcacaagcgatgatcggcccatattcctgataagctaaaatgctgtcccaatgattggcgcgggaagtaatgatgagaccgtctattttcttcgttcttaacagctctaaatatttgatttcaatatcggggttataattggtggggagaagggtcgttgcatactcatactgaaaagccgccttggtgattccgttaacgattttatcaaagcagggatgatcgctataaggcagaatcacaccgaccgtatgggttttcccgcgaatgagatcgattgcggttcgatttggcgtataatccaattccttcatgacttgatgaacaagctttctcttttcttcagatacataaggatggtgattcaatacacgcgagacagtcgaaacagatacatttgccagtcttgcgatctcttttatatttgccatctctttctccttttcatataaaaaaagcagtaagtgtaaaatccttactgctatctcatcatatattgatgataagttcaacaggacaatggtcggaacccatgacgtccgctgatatgcaggcatcttcaatctgttccttaagtctttcagaaacaacaaaataatcaatccgccatccgatatttctgtcccgggcgccggcacgatacgaccaccaggaataagcgccttcaagatcaggataaacatgacggaaagaatcaacaaagccagcttctaagaaacgagtgaatgcccctctttcttgatctgaaaatccagcgttattccggttcacctttggatttttcaaatcaatctcctgatgggctacattcaaatcaccgcataaaatcactggttttttctgatccaattcaagaatataagacaataaagcctcttcccattgcatgcggtaatcaatccgctctaatccccttctggaattgggcgtataaacagtcatcacatacacgttttcaaattccagcgtaatcactctgccttcttggtcatgctcttctactccgataccgtagatgacctgcagcggttcttgcttagaaaaaacagctgtgccggaatatccttttttcactgcataattccagtacacatgatagccttcaggctggagatcaacctggccgtcctgtatcttcgtttcctgaagacatataatatctgcatcctcttctttcaaataagagaggaaatccatttttctcatcacagcccgcaggccgtttacattccatgaaatcaacttcatgtttcatcctcccccctataaaaaagagcaagaacccgaaggtccttgctctttacgcatcagcttactcaccgcttacgtatggaagtaaagccatttgacgtgcgcgtttgatcgctgcagtcaatttacgttggtatttagcgtttgttccagttacacgacgtggtaaaattttaccgcgctcagaaacaaactttttaagaagatctacatctttgtagtcgatgtgcgtgataccgttagaagtgaaataacacactttacggcgtttcgcacgaccgcctctgcgtcctcctgccattgtcatttccctcctttctttttcattttaggcgataatcacattagaatggaagatcatcatccgagatgtcaatcggtttgccgtcgttggcaaatgggtcatcattaaagctgttcccctgattgcgtctctggttgttttgatttcccccaaatggattatcattttggcctccgccaaagtactggcctccgccgctgtttccttcgttgtatccacctgaaccagaaccgccgccgtttttcggctcaagaaattgaacactttcagcttggacctctgtcacgaagacacgctgtccttgctggttttcatagtttcttgtttgtaaacggccatctacgcctgcaaggcttccttttttcaagaagtttgcaacgttttcggcttgtcttctccaagtgacacaattaatgaaatcggcctcacgttctccggactggttcgtaaatgtacgattcacagcaagagtaaacgtagcaacagccgcaccgtttggcgtataacgaagctctgggtcttttgtcagtcttccgactaatacaactcggttaagcataagaaagaccaccttttaccattatatatttcaaaattgcttattcttcttctttaacaacaatgtggcgaatgatatcgtcactgatcttagctagacggtcaaattcttgaactgccgcagcgtcagattgaacgtttacgatttggtagaaaccgtcgcggaaatcgttgatttcgtaagcaagacgacgtttaccccaatcctttgttccagtgatctccgcaccgttagaagtcagaacgttgttgaaacgctcgataactgcttttttagactcttcgtcaatgtttgggcggataatgtacataacttcgtactttctcatctgtttgcacctccttttggactaagcggcccataatgggcaaggagcaataattctattactcacaattttatattataccaaagctcttgtccctttacaactgcatcctatacattaaatcggaaatgaataacatctccgtcttggaccacatattctttcccttcaaggcggacttttcctgcctctttagctcctgccataccgccgcccgcaagaagatcctcataagcaactgtctcagcacgaatgaagccccgctcaaagtcactatgaataattcctgcacactcaggtgctttcatgccttttttgaatgtccaagctctgacttcctgttctccggctgtgaaatatgttgcgaggccgagaagagagtaagacgctttgatcagctgatcaagacctgattcttgaatgcccagctcttccaagaacatttgcttttcttcgccttcaagctcagcgatttcagattcgatttttgcacatacaacgataacttctgcgttttcgccggcagcgtactcgcgaatcttcgctacattttcattgccagatggatcagcaacttcatcttcacttacgttggccacgtacaaaataggcttcgaagtcagtaaatggagctgcttcacaagcttttgctgctcctcagtgaattctacagatcgagcaggcttttcactctcaaacgcttctttcagtttagataaaatctcaaactcaaatacagcgtctttatctttttgcttcgcaagcttgctgacgcgtgtaatccgcttttcaaccgtttccatatcagcgaggatcagctcaaggttgatcgtttcaatgtcatcaatcggatcaacctttccggaaacgtgtgtaatgttgtcatcggaaaaagcacggacaacgtggcaaatcgcgtcaacttggcgaatatgagataggaacttgttgccgagtccttctcctttagatgcgccctttacaatccctgcaatatcagtgaattcaaaagcagtcggcacagtcttcttcgggttgaccagctcagtcagcttttgcagacgatcatccggcacctctacaattcccacgttcggatcaattgtacagaacgggtagttggctgattcggcaccggcctgtgtaattgcgttaaatagtgttgattttccgacgttcggcaaaccaacaattccagctgttaaagccattctttcatctcctctatataaaaccgtcattgtatgaacgtattttgaacctagagcaattataaggaggttcactggaaaagacaagctgacaaaaaagcattttcagcctgccaatccctttgattatgcttttttcaagcctactaaacagtcaaaaagcgtacttcccattccattatcagaatttgtatcatttgtcagtgcattgactgaccctccaaaagccgcccacatgccttcatctatattaatcgtcttcgcatgagcctgcttcatcactttcaccttgcccttcaagcgtccgcggtcattaaagataacaacttcgtctccattctgaagatcctgctcagccgctatatctggagaaatatcgacctgaacgtgctgaagcttttcaataaacggcacatgctgtgaatggttggaacgctgcggatgaatggataacagcgtataagggtacttttcagctaactcctcattatggaaaacagattcttcgggcacatttaattgaagcgagccgctaaatcctttttgctcagctagcgacgaagtaaattcaaattttccactcggcgtcaaaaactgataatcatcccacggcacctgttttactggaagagggaggtggcctttttcttttaaacgctcaagtgtcacatcctctgcttccaatgaagaaagccccatctctaaaaattcttgagtgctgtattcaaacagctcgccaaatccaaggcgttttgcaagctctgaccagatccagctgtccgacttcgcttcaccctgcggctccacaagcttcttcccgtactgaacataatgatgatacatactggaatagtagatatcttcttcttcaaaaacagtggcagtcggcaaaacataatcacacagctttgcggtatctgtcataatggaatcaatcgcaaccgtcatgggaaccttttcaaaagcttgtctcaccttatttgtattcggcacctgagtcagcggatttccgcacgtcacaataatcatctcaatcgcaggatcagcagcggtcaacacttcttcagcctgcgtcatcattgaaaaagaacgtgatgttgtttttaattccggcaacgtcagctttgtttttgcaaagctctcgccaatctggacatttccgaaattcgcgccgccgcccttaattccgacatttccgcttgccgcaacgagtgcatcaatccaacgaatcgttcccccgccgtttttatatcgctgcatgccaagccccataaaagtagacaccggaccatcagcatacaaaccggccagatactccagctcctccatagaagtttctgttttcacaataaactcttccagagaaacagttttcaaaagctctttcacatcatcaaaaccgacagaatgctcagaaataaacgtttcatccgttcttcccgtctcaatcagaaccttcaaaacggctgccgcaagccagccgtccattccaggctttacagagatatagcggtcagcaagcttagcagtcgggttgaagatcggatcaatcaccgtaatcgtggcgcccttctttttcacctgctgcaagtgatggtataagtgcatatttgttctggatacatttcttccccacacaacaacatgcttgctgttgtaaatatcaagcgggccgtgaccgtacgaacggccaaaatcccagctttgcgcctcgatgccggagccccagcatatgcttccgacgatttcagtcacgcctccatatccattaaaaaaacgctgatcaagcgcttttaacagaccgttattcgcataatcatggctgtgcaaaacagcagtcgtctccgacgtttccttgatttcccgaagtttatcggcaatttcatcaagtgcctgctcccaagaaatccgcacaaactcgccattttgttttttcattggatagcgaagccgatcaggcgaatttgtttttgtctcaagcattctgccgcggccgcagattttaccttccgtaatcggatggtttggatctccgtccacttttgttacctttccatcaacaacagtcaccaaaaagccgcagctgtcccaacaattcagcggacatgccgactgatgcactttgctcatcgccgtcttctccttaccttctatatgaaaaagcatgagtgtcggcctatttatgaagtaggctcctcatgcttgactagtactttttttagttttctttcaaattctcttctcggaatcataacactgtgagagcatccctcacacttaattcgaatatccattcccatgcgtataattttccagctgttcgctccgcatggatgcggttttttcatttctacgatatcattcaggccaaagtctttatccgccaagacccttcacctcttttcctaaactgctgtatctattgtacaaaaaaactgatcataagagcaatcaagatacccgaaaagaaatacatcctcttatttccatttactcaaaataggatataagagcagacaaactaacaaatacaaattgagcatcccatatatcggatacaagaacgcgatcaaatcagaaaatccgaaagaagtaaaaggcaccattaacactaacaaaatcaacacaatcacccatctcggcatatgaataaacgccatcagccggctggacagccccagcaaaccagctaccgtcgtcgtgtaaatcgccaggcacagcaccgccgtcatacataaaaaaaggaaataaggcgcaccctccagaacggcaaacagcggtatttcaaactgagaaagggagcccgccagctccaccaacgtttcattataaacaaatgagatcacgccaaaaataagaccgcttgccacacttgcgatttttgcttctccgagccctttcatctctttcccaacagaggataaaatcgcaacaactgaaaggatgtttaaagaggtaaacgtaatgctcgcaggccagttatactgctgggacaaatcaatcgtccacgtatggtgatgtgtgctctgaaaggagatcagcgcatataaaagccccgctactaacacaggaatcaaaatactatttatagataatattcctttcacatcccacaaaaacaaacacactgtcacgatgcaaatcagcgtgattccccaccagaaaggaagcttgtacatttgcagggtcacaccgcctccggcaatcatcaccatagtcgtcgaaaacaaataaaaaatgatgaggacatcataaattttcgccagccatggccccattaaatgctccagaaccggcagaaaatgagtggattgaactttaaaactgattttcatcacaatataagacgagaaaatgaacatgattgtaaacagcacaatagcaagtccgctttccgccccaaaaaactgccatatctcctgaccgctcgcataaccggccccgatcaggctccctaatatgagcagcatccacttcattccggctctccacaacactatcacctcatagacaaagttcagcttgtttccgttattgttactatataaataaaagaaagcaaacatgccatattttcatagacatttaaatacaaggtgaaattatcatacgaaatacacataaaaaaagactgctaatggaggcagtctaaaaatatatcatcttgcagtggaatgaaggaatgaacctcattaaccattcctatctataaagtgttttgtaagcaaaccgtagcttgatcatgatcgaggcaatgggggacaatatttataattcacccactaaccattcataataacctctacttttttaaaatctccggtgtcatacacaaagcataaaaaaccgtactgctggatatactgtaaacaaccttacataacgaaacacacaccatagcaattctgttacctactataacaaggaagtgaaacctatgaatcgaaaaggcgggcttttttcctctcaggaacgagtaaaacaatatgtttcacatacagatgcagctgcagcaaaacaaatccaaaccattctttcttcatccttacgtaaagctgccggcaaaccaattgttgtggtttgtatcggaacagaccgttcaaccggtgattcattgggcccactcgtaggaatgaaactcaaacagatgcagctcaccagattccatgtctacggaaccttatctgaccccgtccatgctgtgaacatgaaggataaaatcaatgacattcataaattacataaaaacccatttgttatagcggtcgatgcatgcttaggccgcgttaagagtgtgggttcatttcaaatcggggacgggccattaaagcccggagccggtgtacaaaaagaccttcctgaagtgggagatcttcatattaacggaatcgtgaatgttagcggtttcatggaatattttgtattgcaaaatacaagactcaacttggtcatgaatatggccaatgttctcgcggaaggattgagtttaacagatcggacagagtggaggcaagaacgccttaacccgttgcaaaggctcactgggcgcatataaaacaaaaaccatcttcgcttgaaagatggtttcttcatttacgattctcgttcagataaaagctctaaaatccggtcaaggtcttcattagagaaaaattcaatttcgattttgccttttttcttctgtcttttaatattaactgttgttccaaaataattttggaggtaggattcccgttcttttagaaccgcatctttcacaggttcttttttctttgtttcacgtggaacattctgattcaactgctgaatcagctgctcaagctggcgaacattgagctgctccgcaatcactttttgtaccagcggttcaagcttatttttgttttttaagccaagaagcgtgcgtccatgtcccatagaaagcgtaccttcggcaataagctgctgaatattttctggcagtgtcagcagtcttaaatgattcgcaatatgcggtctgcttttcccaagacgtttggcaagctgctcttgtgtgagatctaagtgtttcaacaaggaatcatatgcctgagcctcttcaagcggagataaatcttcacgctgaaggttttctaataaagcaatttccctcattaacgcctctgataattcacggacaatggccggaactgtatctaaacctgccagctttgccgctcgaaaacgccgttcacccgcaacaatatcatagccttttaaagattttctgacgataagcggctgaagaatgccatgctgcaacacagattcttttagttcagctaatgcctcgtcatcaaagtgttttcttggctgataaggattagggcgtaaatcggcaattttaatttcttcaactgtctcttcagacaaatctacctgattaaataacgcattaatcccttttccaaggcctttagccattcgcagccacttcctttgctaaatctaaatatacttccgcacctcttgaccgcggatcgtataaaatgatgggttttccgtgactcggtgcctcactcagacggacattacgcggaataactgtcttatatactttatccctaaaatactttttaacctcttcaatcacttgaatgccaaggtttgtccgggcatcaagcattgtcagcaatacaccttcaatcattaaatcagtattcaaatgcttttgcacaaggcgtactgtatttaataactggctgagaccctccaaggcataatattcgcactgtacaggaatcacaacggaatccgaggcagtaagggcattaatcgtcagcaagcccaatgacggcggacaatcaatgataatataatcataattttgctttactgcttcaagcgctctcttcaatctcacttctcttgatattgtaggaaccagctcgatctcagcccctgcaagctgaatcgtcgcaggaatcacatccaagttctctactgtcgttgctttaataatatctattacatctgcatcatctactaaaatatcgtacacacactgctctacatcggctttttcaatccctaatccgcttgtcgcatttccctgcggatcaatatctaccagcagaacccttttccctatgtaagccaaacatgccccaaggttgacagacgtcgttgttttgccgaccccgcctttttggttcgtaattgctatgatttttcccacgatgtcacctactttcacatgaacatgtactatcttgcttctattctatcaaaaaaagattaaagcgtttcatttttttcatcattttgttccgaatcagaagggaaataattgaaaattcaagcacgctttatgctttctcttataaattctgcaatttctatgtttttttgacttaaaaaaggaatttcttaaagaaaaaaagaagaagtcacggtacagaacgtggaaacaggatggtgagaaaatgatttatcaaacgaagagagatgtacccgttacgctgatgattgtgtttctcatattactgatacaagcagatgctattgttccttttgtgctgggaaatatgagagtttccggctggatcatttttattctgctgactcttttaaatggactcatcatttggagctttattgacctaaaatatgtattgaaggaacaccatctgatcattaaagccggattgatcaaacatcaaattccttatgaaaacatcgataaagtcgttcaaaaaaagaaactgtggtccggttttcgtctgatcggctctcgccatgccatcacaatatattatcaggggggatggggacatgcagtgatttcaccgcaaaaatctgaagaatttatccccaagctcaaagaaaagaattctaatataataatattcactaaaagtaagtgattaccttttatttaaaatataaaaagctctcctgcttttcaggagagcttctattttggtatgcgaatcgttaattgaatatattcttcaaattcttcttcttccgtattcaattttacaccgctgtcttccaccattgatagtgactggcgaatcgtgttcatcgcaattcttgtatctctgctgaatgctttgcgtctcggctttggctttctcttgccttgctccagcattttcaccacgcggtcttccgtctgctttacatttaaacttttctcaataatctctgtgagcagtgtgacttggagctcaggctgtttcagcggaatcagtgctctggcatggcgctcggtgattttcttctccataattgcctcttggaccggctgaggcagctttaataaccgaagcttattcgcgattgtagactgcccttttcctaagcgctgtgcgagtgcctcctgtgttaaatcatgcagctcaagtagcctagcataagcatgcgcttcctcaatagaagacagttcttcccgctgcaagttttcaattaacgccacagaagcggtttccgtgtcggaaaaatccttaataattgccggaatcttttcccactcaagcgattgcaccgctctccagcgtctttcacctgcaatgagttcgtattggccttcttcttctgtatgcctaacaacaatcggctgaataatgccgtgtgtatgaatggtcattgctaactctttgattttttcatctgagaaaatggtgcgtggctgaaaacggttgggaacgatagcatttaccggtatttccagaatctcttctttgtttgtatcatgttcagcaatctccggctccggttccttctcaccaagcccgaagaaacgagagaatgaatgcttcatgtacctacaccacctttaaaaactgccatttttataattctattttctcatggtttttcctgctgtacatccatcaattttgatgaaaatatgatggtattgtcatatcaggctgtctaaattacccttcaattggcgatttattaggagttcccggttttcttggatacttcttaggtgtattttttattttgcgtatcaccataatattacgatcgctttcttcaataggcagcttaaaagaatggatattctcaagttctcctccaagcgtcgtgattgcttttttgcctgcattcagttcttcttcagctgatgcggcttttaaagcaacaaataaaccgtttttcttcaccagaggcaagcaaagctcactcaaaacagataatctcgcaactgctcgcgctgtcacaatatcatagctttcacgcacgtctttccgttgcccgaacgtttcagctctgtcatggcagaatgttgtattctccaattgcaaagcctcagatagcttttctaaaaacgtgatccgtttattcagtgaatccacgattgtgacattgaggtgcggaaagcatatttttatcggcagacttggaaaacccgctcccgctccgacatcacaaatcgtgttcacctgattgaagtcgacataaaaagtagctgtaatggaatcataaaaatgctttaaatacacttcttttttctctgttattgaagtcagattgattttttcgttccattcaaccagcatgtcgtaatacagctcaaattgctccagctgacggggagaaagggagatccctttttccgccaaaccagaagtgaattcttcaatattcatgccgtcatcctttctattcggctatcttcgcaatgcgtccctgctctaaatacaccaatagaattgaaatgtccgccgggtttacaccggaaatgcgggaagcttgggcaacagacaaaggccgtacatttttcagtttttgacgcgcctcggtcgcaatccccttaattgcgtcataatcaattcgatctggaatttttttattttccatcttcttcagtttttccacttgctgaagagatttttcaatatatccttcatatttcacttggatttctacttgttctgccacgtcttgaggaactggcacttctggcggcgccagttttgtgactgtttcatagttcatttcaggacgcttcatcaagtctgtgccgcgaactccatctttcaattcgcttccgccaagagaacggatatattcttgattttccggagacggcttgataattacagaatgaagacgttttttctccgcctcgatcgccgcttttttcttctcaaaagccgcatagcgctcatcagaaatcaatccaatgcgatgtccgatttctgtcagacgcaaatcagcattgtcatggcgaagaagcaatctgtattccgcacgtgatgtcaaaagacgatatggctcattggttccttttgtcacaaggtcatcaatcagaacaccaatataggcgtcagaacggcttaaaatcacttcttcttttccaagcgcttttcgtcctgcattgattcccgccataatcccttgtcccgcagcttcttcataaccggaagttccgttaatttggcctgcagtgtaaaggtttgtgattttttttgtttcaagtgtcggccagagctgtgtcggtacgattgcatcatactcgatcgcatagccggctctcatcatttgcacgttttcaagtccaggaatcgttgcaagcattctttgctgtacgtcttctggaagacttgtagataaaccttggacatagacttcctgtgtatttctgccttccggctcaaggaagatttggtgacgcggtttatcattaaaacggacaactttgtcttcaatggatgggcagtatcttgggcccgtacctttgatcataccggaatacatcggtgaacggtgcaggttgctgtcaataatctcatgtgtctcagggcttgtatatgtcagccagcaagggagctgatctgtgatatattccactgtttcatatgagaaagcgcgaggcacatcgtcaccaggctgaatttccgttttgctgtaatcaatcgtgtcgcttttaacgcgaggcggcgtacctgttttaaaacgaacaaggtcaaaaccaagttcctccaaatgctcagaaagcttaatagaaggctgctggttatttgggccgcttgagtaagacagatcgccaagaataatacgtcctcttaaatatgtccctgtcgtcatgacaactgctttcgcacgataatgtgcaccggtttgtgtaataacgcctcggcattcgccgtcttcaacgatcagccgctccacaattccttgcagcaatgttaagtttggttctttttcaagcgtatttttcatttcgtgctgatattggaatttgtctgcttgcgcacgcaatgcacgaaccgcaggaccttttcctgtattcagcattctcatttgaatatgcgttttatcgatgtttcttcccatttctccgccgagcgcgtcaatttcgcggacgacaatcccttttgcggggccgccgacagacggattacatggcataaatgcaaccatatctaggttgatggtcaagacaagcgttttggcgccttggcgtgcagatgcgagggcagcctcaacaccggcatgcccggcgccaatcacaatcacatcgtattggcctgcttcataccccatgattctagttcctccttttattattttcctaaacagaattgtgaaaagagctgatcaattaagctttcgtggacagaatctccaatgatttcccctaaaagctcccagcatcttgtaaggtcaatttgcaccatgtcgatcgggacatcctgttcgatgccgctaagcgcatcttcaatggcgcgttttgcttgctgtaaaatagagatgtgacgtgtgttgctgacataagtcagatcaccgctttcaatggcacccgtgtagaacagtgattgaatcgcttcttccagatcattgatgccttcctcttttaaaagagatgtcgtaacaactggacgtccattggcaagctcacggacacgttcagtgtcaatcttcgcctcaaggtcagtcttattcaaaatcacgataacatccatgccctcaacggcttcaaaaagcttcacgtcttcatcagaaagctcttcactataattaagcacaagtaaaatcaggtccgcttcctttagaacctggcgagaacgttcaacaccgattcgctcaacaatatcctctgtttcacgaatacctgctgtatcaaccagacgaagcgggacgccccttacattcacgtattcctcaatcacatcccgtgtcgttccgggaatatcggttacaatggcttttgcctcatgaacgaggctgttcagaagagatgattttcctacgtttggccggccgataatgacggtagaaagaccttcacgtaagatttttccttgctcagaagtcctcagcagcgtctcaatttcctttttcacggcggttgccttttcgactaaaatctgatgcgtcatttcctctacatcatcatactccggataatcgatattcacctcaacatgggccagtgtttctaaaatctcactgcgcaaacggcgcaccaaagcagaaagacgcccttccatttgattcatagcaacgttcattgcccggtccgttttcgctctgattaagtccataaccgcttccgcctgtgaaagatcgattcggccgtttaaaaacgcacgtttcgtaaattcaccaggctctgccagtctcgctccctctcttaatgcaagctgaagcacttggttcacagtcacaattcccccgtgacagttaatctcaatgacatcttctcgtgtaaaagttctcggtgcttttaacactgataccattacttcctcaacgacacgatccgaaggtctgtctacgatatgaccataatgaatcgtatgtgattcgaccgagctgagtgttttccccttcggtcccttataaattttatctgcgatttgaatggcttctggtccgctcaaccgtacaatcgcaatcgcgccttctcccatcggtgtggaaattgccgcaattgtatccatgttgttcacctctctttacttatacttcatctatataaaaaaatttttattatgccaaaactaaaagataacatagtttggttcgaagtggaagatttgttatccacagaaatagaaattcgtcccttattactttaacttatccacatgtgaataacaattaattttatttcctgaacttcctttttatcaacaggatacacctaaaaagaaaaaacttaaacggcaaaaccttgatattactaggaaaagtagatttttcggatacaaaaaaaccgaaatccaatttttatcggacttcggttttatgctatcttttatgggaaataacgagatgacgattttcgccttcacccattgaatatgttttgatctggtggtttgcatatccagaaagagtatcgtgaataatttttctttcgctggacggcatgggctcaagctggatggattttttcgttttcaaaacctggtcagcaagcttgatggccagctggctcagtgtttcttttcttttcaaacgatagttttctgcatccaccgtcacatttttatattggcctggataacggttaagggcaagctgtgtcaaagtttcaagggcgtttaaggtttgtcctcttttcccaatcaacaatgctgccttttcacctgttatatgatatctcactgtctttttgctttcttgaacagtcacatcagacttcccggcaatggcttcggcaatcgtttgaagatataacttcgcttgctgaatcggatcaatcttttcaaccagctttacgatcgcaggctttttaccgaaaatgccgagaaaccctttgtttccctcttcaataacagtaatttctaccttatccttcgttaatcccagctcttgcaatccggactgtactgcttcatcgacatttcgccctgcagcagtcacattcctcactttttctttcctccggctttttgcggctcaggattttttttaatatcaggtcctttaatgaggaaagtttgcgcaatcataaacaagttaccaactacccaataaagagaaagagccgccgggaagttgatcgcaaatacgataatcataattggcataatccaaagcatcatcgccatttgcggattttgctgcgcattgccagccatcatcagtttttgctgaacaaatgtagcgacaccggcaacgataggaagaatatagtaaggatctttttctcctaagtcaaaccataagaagctatgctctgaaatcgcctgggttctcatgatcgcatgatagaatccaattaaaatcggcatctggatcaaaatcgggaaacatcccgccaatggattgacaccatgcttttggaataaagccattgtttcctgctgaagcttttgctgcgttttttgatcctttgagctgtatttttctttaagcttttgcatttccggctgtaaagcctgcatcgctttcgaacttctcagctgcttaatcatcagcggtaaaattaataaacgaattaaaatggtaactagaattattgaaagcccgtagttatctcccgtcaatttcgctacatacgtaatgagctcagacaatggatatactacgtacttgtcccagaaatgcggactatctgcagtgatcggctctttcacactcgagcatccagccaaaagcatgaatacgccaaccatacttaatagcaaccctattctccttttcaacaacatttcctcctataattaatctttacactcttttattgcaaagcatacttgtatgtattttagcatctttcagttttaaatggtgtctttttctgatcaaccagaaaggaagcgcttttaaaagttgtaagaaagcagtggtgatgcctactttgacgaagatttcttatataatgaagactttctgaatagatgctgcagactttttttcgtttcctcatatgtcagctggctcgccggttttctggcaataatgatgtaatccttttccttcagtctctctttctcctcaagaaaggcctgccgaatcaaacgtttgatccgatttcgcatcacagcattgccaatttttttgctgacggaaagcccgacacgcagttcatcattttcaggctgatcaagcgtatataagacaaactggcggtttgcaactgatgtcccatgtttaaacactttttgaaaatcttcatttttctttaaacgatttcgcttcttcaaatgactcactccgatactggctggcagaaacttttaaaatttattatgaacatgagatgcatctgaaccaggaagcatgccccggttcattacgcatcacatctatcttttcccataacgtgaaaaaagaccactgacattattcagtggcctaagctgataatacttttctgcctttgcggcgacggcgtgctaaaactagacgaccgttttttgaactcatacggcttctgaagccatgaactttgctgcgtttacggttattcggttggaatgttcttttcatttatgacacctccctcgaggaatagctgttaaagacagtcttacttattatatttgcgttacctattcattgtcaacttcactagtgcttttatttcttgcaaccataataggataccataccttttcaactttcgaaaccttattttttagattccttaattttacggaaaaaagacaaattcaaacaatttgcccctaaaatcacgcatgtggatatctttttcggctttttttagtatccacagaggttatcgacaacattttcacattaccaacccctgtggacaaggttttttcaacaggttgtccgctttgtggataagattgtgacaaccattgcaagctctcgtttattttggtattatatttgtgttttaactcttgattactaatcctacctttcctctttatccacaaagtgtggataagttgtggattgatttcacacagcttgtgtagaaggttgtccacaagttgtgaaatttgtcgaaaagctatttatctactatattatatgttttcaacatttaatgtgtacgaatggtaagcgccatttgctctttttttgtgttctataacagagaaagacgccattttctaagaaaaggagggacgtgccggaag
